United States Patent Application Publication US 2022/0031776 A1 - sequence listing, part 8

SEQ ID NO: 283 - DNA, 5272966 bp, Klebsiella pneumoniae (residues 3,515,313-5,272,966 of 5,272,966)
  modified_base (3084)..(3118): a, c, t, g, unknown or other
  modified_base (28433)..(28436): a, c, t, g, unknown or other
  modified_base (118067)..(118310): a, c, t, g, unknown or other
  modified_base (118851)..(118896): a, c, t, g, unknown or other
  modified_base (120449)..(120449): a, c, t, g, unknown or other
  modified_base (194278)..(194326): a, c, t, g, unknown or other
  modified_base (584922)..(584993): a, c, t, g, unknown or other
  modified_base (711312)..(711341): a, c, t, g, unknown or other
  modified_base (715352)..(715400): a, c, t, g, unknown or other
  modified_base (765525)..(765701): a, c, t, g, unknown or other
  modified_base (812107)..(812110): a, c, t, g, unknown or other
  modified_base (812502)..(812502): a, c, t, g, unknown or other
  modified_base (857630)..(857672): a, c, t, g, unknown or other
  modified_base (858090)..(858182): a, c, t, g, unknown or other
  modified_base (858823)..(858981): a, c, t, g, unknown or other
  modified_base (862845)..(862958): a, c, t, g, unknown or other
  modified_base (865109)..(865146): a, c, t, g, unknown or other
  modified_base (865226)..(865388): a, c, t, g, unknown or other
  modified_base (866202)..(866559): a, c, t, g, unknown or other
  modified_base (866925)..(867036): a, c, t, g, unknown or other
  modified_base (867121)..(867426): a, c, t, g, unknown or other
  modified_base (867608)..(867654): a, c, t, g, unknown or other
  modified_base (870232)..(870256): a, c, t, g, unknown or other
  modified_base (871603)..(871702): a, c, t, g, unknown or other
  modified_base (915086)..(915090): a, c, t, g, unknown or other
  modified_base (1078260)..(1078399): a, c, t, g, unknown or other
  modified_base (1437186)..(1437315): a, c, t, g, unknown or other
  modified_base (1474838)..(1474960): a, c, t, g, unknown or other
  modified_base (1833250)..(1833311): a, c, t, g, unknown or other
  modified_base (1849808)..(1849884): a, c, t, g, unknown or other
  modified_base (2382722)..(2382724): a, c, t, g, unknown or other
  modified_base (2518065)..(2518120): a, c, t, g, unknown or other
  modified_base (2565196)..(2565222): a, c, t, g, unknown or other
  modified_base (2715478)..(2715507): a, c, t, g, unknown or other
  modified_base (2716052)..(2716069): a, c, t, g, unknown or other
  modified_base (2932552)..(2932675): a, c, t, g, unknown or other
  modified_base (2956671)..(2956674): a, c, t, g, unknown or other
  modified_base (3023549)..(3023584): a, c, t, g, unknown or other
  modified_base (3040821)..(3040950): a, c, t, g, unknown or other
  modified_base (3111775)..(3111801): a, c, t, g, unknown or other
  modified_base (3118418)..(3118422): a, c, t, g, unknown or other
  modified_base (3118876)..(3118876): a, c, t, g, unknown or other
  modified_base (3154319)..(3154319): a, c, t, g, unknown or other
  modified_base (3269529)..(3269710): a, c, t, g, unknown or other
  modified_base (3309401)..(3309441): a, c, t, g, unknown or other
  modified_base (3335149)..(3335152): a, c, t, g, unknown or other
  modified_base (3360871)..(3360879): a, c, t, g, unknown or other
  modified_base (3416473)..(3416532): a, c, t, g, unknown or other
  modified_base (3628287)..(3628377): a, c, t, g, unknown or other
  modified_base (3687336)..(3687340): a, c, t, g, unknown or other
  modified_base (3689484)..(3689493): a, c, t, g, unknown or other
  modified_base (3750363)..(3750397): a, c, t, g, unknown or other
  modified_base (3755060)..(3755177): a, c, t, g, unknown or other
  modified_base (3755667)..(3755794): a, c, t, g, unknown or other
  modified_base (3786881)..(3786881): a, c, t, g, unknown or other
  modified_base (3836150)..(3836159): a, c, t, g, unknown or other
  modified_base (3922163)..(3922163): a, c, t, g, unknown or other
  modified_base (4002041)..(4002090): a, c, t, g, unknown or other
  modified_base (4020308)..(4020355): a, c, t, g, unknown or other
  modified_base (4253670)..(4253671): a, c, t, g, unknown or other
  modified_base (4407247)..(4407287): a, c, t, g, unknown or other
  modified_base (4481789)..(4481888): a, c, t, g, unknown or other
  modified_base (4611337)..(4611453): a, c, t, g, unknown or other
  modified_base (4611987)..(4612023): a, c, t, g, unknown or other
  modified_base (4757534)..(4757557): a, c, t, g, unknown or other
  modified_base (4778509)..(4778557): a, c, t, g, unknown or other
  modified_base (4864858)..(4864950): a, c, t, g, unknown or other
  modified_base (4898019)..(4898074): a, c, t, g, unknown or other
  modified_base (4898178)..(4898240): a, c, t, g, unknown or other
  modified_base (4898624)..(4898864): a, c, t, g, unknown or other
  modified_base (4899005)..(4899060): a, c, t, g, unknown or other
  modified_base (4899122)..(4899164): a, c, t, g, unknown or other
  modified_base (4903024)..(4903183): a, c, t, g, unknown or other
  modified_base (5011684)..(5011702): a, c, t, g, unknown or other
  modified_base (5031234)..(5031344): a, c, t, g, unknown or other
  modified_base (5117782)..(5117974): a, c, t, g, unknown or other
  modified_base (5125879)..(5125958): a, c, t, g, unknown or other
  modified_base (5166378)..(5166504): a, c, t, g, unknown or other
  modified_base (5166581)..(5166581): a, c, t, g, unknown or other
  modified_base (5244451)..(5244518): a, c, t, g, unknown or other
  modified_base (5246908)..(5246931): a, c, t, g, unknown or other
atcagcccgcgaaggtttagcggctgacggcgcgttgccatgcgctaatccaggtttgacgctcgctggcgacctgctgcggggtaaaggacagggtggtctgcggcttcaccagggtatcaaacccggccggcagggtgaccttggtcaccggatacatccagttgccggtagggatggcgttctggaagccaggagataccataaatttgaggaatttttccgccagttccggctgcttgctggcggcggtacgcgcggcaacttcgacctgcagatagtggccctcggcgaagctcgccgccgcatagttgtctttcttctcttcaatcatgtggtaggccggcgaggtggtatagctcaacaccaggtcgctttcccctttcaggaacagaccataggcttcgctccagcctttggtgacggtaacggttttcgcggccagcttctgccaggcctcgggcgcttgatcgccatagaccttttgcatccacagcagcaggcccagtcccggggtgctggtacgcggatcttcatagatgacccgccatttttgcgggccctcgaccagctctttcaggctcttcggtggattagccagtttgtttttgtcatagacgaaggcgaaatagccatagtcgtagggaacaaaggtgtcattatcccagccgcccggcacgctgaccgcgctggcgggtacgttgcttttggcaaacagtttactctgcgccgcggcttccagcaggttgttatcaaggccaagcacgacgtcggccttgctgtttttgccttccatgcgcaggcgattcagtagcgaaacgccatcttccagcgcgacgaacttcagctcgcagccgcactccgcttcaaaggcttttttgaccgccgggccggggccccagtcggcagagaaggagtcataggtatagacggtaagaacaggcttagccaaagcgggcatggcgaccagcgccagcagcgggagtaattttttcaacactttgcacctcagaaaaaaggggtggcaaaggattttgagtgagcctcaaatcccttcgccggcgttatccggatcaggttcgacgggtattttctcagcccatacgcttcatccttcaagccgcatctgcgttagcttcgcgcgttcaccccagtcacatagttatctatgctccaggggattcacccgcttgctgccttgatgcaacttgaatgatattgcgtatgtttattagcaccccgttgagaacggccttagtgtaatgattttgtcagatgacggaaagcgcttacggctccggcggcgcaaaccatgcggatttaaaatcgaaccagccgagggtattcatcctcacgccgcgcatactgcgctgaccctgaatcatcagccagtggtggatcagcggcacgatatgttgcccggccagcagccgctggctccaggtggccggattaaactctcctgctcgccagcggcaggcgtctgcctgccagtcaatgggaatgcagcgctgaatcagcgggacttcgtacagataggcgaagagcgaaaattcgatcggtaaggtgaagttcacgctgttgagccagatatcgctgaccacctcgccgcgatgccaggcatcgtactccagctcctggatctccagctttacctgatgcgccgccagcaggtcgcgcatgatcccgccgatcacccgatgttcgacgtgatcgcggtagtaggtaagggtgactgtctccagccccgccggcttctcgcaggcgtggttgctggcgtgatgccagcgcggcagcaggccgtaggcgggaaaccagttgccctggtagtgttcgcccgcatggtagagcaggttggcgggctgaaacagatagcttagccagcggcgcaccgcgtcgttggcccccagcgggcttcgcgagtcgaacaacaggtaatagcagccctcttccaggcgactctctaccgctttttcgctttcggtattgccctgcagcgtcaggccgccgttgggctcttcgctaatctccggcagcacccagacgttcacctcatcgatcagcgcccggtagccaaaatagtcctcaaaggcatggatcttgagctgattctggttgttacgcaccacggcataggggccggtgccgaccggcatggaggaaaagtggttcatggtctgccactcctgcggcagcaccatcgccggcacctgccccagcagccagggcagccagcggtcgggctggcgcagatgaatatccagggtccaggcggtgggcgattcgatgcgttcgatatgtgaatagagcggcagggcattgctgcgctgcagagaggcgatcacatcggccatctccagctcacggccatggtgaaaatggatgccgggacggaggaaaaagcgccagtgggtgggggtcagctgctgccagtggtgggcaatatcggcttccagttccccattttcctcatttacccgcgtcagggcgctgaatatttgccgggcaatatgcgtttccgaacgccgcagcgcgctaccgggcagcaaattcttcatcggacgatagtagagcacgcgcaggatgtgccgcccctggcggaagctgcggccgagatgcgagaccagcatctggcggacggcagccttatcgccgaccaactgcaccagctgatcgatgcgatcctgctcaaggagatcttcggcacgttgctgctgcagggcgaggccggtatagagaaaggttagccgcgaacgcttgccgcggcctgcctccgcttcccaggtcagccagccgcgggattccatcatattgagcagggtgcgcatatggcggcgcgagcagctcagcatttccgccagctcgttaagggtggtctcctgcgacttgccgtcgcagcactgccataggcgaatgaactgttgttgcagacggccggaagacataaaaggggaactcctgcgcaaaactcagcaatttattacttcctatattaagccaataatgaatcccgatgaagcgaggaggtgaatatgatgaggtctaccgcaaaatcgttctaccaacgctacttttctgcgacgcaggaagcgtcctggctggcccgcctgatggcaggacgacagcaggaaattctgggggaactgatgcagtggggagtgacgtcaacgacctctgatcattgacttgcagacatcatgtgtgactgagtattggtgttatactcgtcgtttttcaaactgcaggtgcgctgtcgatgcttcctgggccgtatgttcgggctgcgtgattcgcctctacgggactcaccttttcagggccagcgcgagcgcggcgcaaaatggttaaccgttttgtcctgcagcatgaaatccatagagtatagaatcacccgccagcagaaagcctctgctggcttttttcgttttcttcgcgtgtgttaaggacattccatgctgtggttgatgacgatgggacgacggcttaacggcgtctatgccgcctttatgctggttgcttttatgatgggcgtggcgggcgcgttgcaggcgccgacgttgagtttgtttctcagccgcgaagtgggggcgcaaccgttctgggtgggcctgttctataccgtaaacgccatcgccgggatcctggttagcctgtggctggccaagcgctccgatagccgcggcgaccggcggcggttgattatgttctgctgtctgatggcggtgggtaatgcgctgctgtttgccttcaaccgccactatctgacgctgatcacctgcggcgtgatgctggcatccattgccaacgcggccatgccgcagctcttcgcgctggcgcgggagtacgccgacagctcggcgcgggaagtggtgatgttcagctcggtcatgcgcgcccagctgtcgctggcttgggtgattggcccgccgctggcctttatgctggcgctcaactatggcttcaccaccatgttctccattgcggcgggcatttttgtcattagcctcgctctgattgccatcaaactgccttcggttccgcgtgtggaacagccctcggaggaggcggcggcgctagcgcaggccggcggctggcaggacaagaacgtgcgtatgctgtttatcgcctccaccctgatgtggacctgcaacaccatgtacatcattgatatgccgctgtggatcagcagcgatctcgggcttcccgacagcctggccgggatcctgatgggcactgccgccgggctggagataccggcgatgatcctcgccggctactacgtaaagcgctttggcaaacgtaaaatgatggtggcggcggtggccgccggcgtgctgttttatgccggactgatcctgtttcatggtcgcacggcgctgctggctctgcagctgttcaatgccatctttatcggcattatcgccgggataggcatgctgtggttccaggatttaatgccgggacgggcgggagcggcgaccaccctgttcaccaacagtatttccaccggcgtgatccttgccggcgtgatgcagggggcgctgtcccagagctatggtcacgccagcgtctactggacgatcgcggccatttcgctggtgacgctgtttttgaccagcaaggtgaaggatatctgactactcgccccggcatcgccggggcgaccaggcctacttgagttcgatacgcttaatgtcgccaatgataaaaatgtaggcaatcaccccaatcagcgccgtcaggccgacgtagatcagcgcgtaaaagaaattacccgtggcggaaataatcacaccaattatcagtggtgcgataatcgaggccatattggcacagaaattaaatatgccgccggtgaggcctgccatattttccggggcaatatccgaaattaaggtccagcccagaccgaccatcccctggccaaaaaaagccaccgacatgataataattacggtgctattggcgcttacccaattcgccgcgataatacagctggacagcaataaaccggaaattattggtaactttcgactgatgttgacggagccggttcgcttcaacaaccggtcggagatccagccgccgaagaggatgccaatcgcggcggcaaggaagggccaggtggcgaagaagccgacgtgcagccatggaagatggcgctcgttggcgaggtagctgggaaaccacgtcaggaaaaagaccagtgtggtgttgccggcgaactgacccaggctggcgccgaggatctggcgacagcccagcaggcgtctggcgtcacgccagttaaatggaacgttctggattttattgttaatgccgtttgcgccgatatactccagctccgcttgattagccgtgcgcgattcatgcggttcatgataaaaacgccaccacactaaagtaaataaaatacctaatccgccggtgaggaaaaaaagcgttctccagccatgatgttcgagaattaaaaataacagcggcgagaaagcggccagccctatatattcaccaactgtatatgttgccgttgcccgcgcgcgctcatgctgagggaaccaggtgctgacgatgcggctgttggccggaaagcagggcgcttcgctgacgccgagtcccaggcgcagaagcagcagggattttaggccgagggtgaaactttgcagcagggtaaacagcgaccagaagaaaattgacagggcataggtcagtttgttgccaaagcggtctaaaaacatcccgccggggatctgcgccagcgcataagtccaggcgaaggcggagaagatgatgcccatcatcgccggatcgatatggatttctttgcttaactgtggcgctacaatacccaggatggtacggtcgagataattgatcatcgttccgacggagagtagcagcagaataactatccgtacgcggcttctttttttcgcccccgatgtggaagtgaggacttcctgagagtttgacatactcatagcgagttcctttaaagtttaaaatatttttgcatatattctaatatgcaaaaatatctcaaggagctataggtagtatctatgaatggcaatgccttgtggcacattcatgcccttcgtcaaataatatttgatgtaacgccgatatttacccgttcatgcgcattattggtggcttgcatggtatattagcgtcagtgcatttattcttatattatacgggtaaaaataatgaacctaaagcaactttattattttaaacgtctgtctgaaactgagcattacaccgaagccgcctccagtctgtgcatcacccagccctcgctaagccacgcgatatcggagctggagaaggagttaggggtcgcgctattcgccagacaggggcggaacgtaaaaattacccaaaacggcaagcgttttttgccgtatgttgaagatgcgctggcctcgctggagaacggacgcatgatattgcaaaaaaatggcgctgagaataaagagaatattcgcatcgcctttatttacacgatgggggagtatgttgttccacagttaattaataaatattctctttcacctgaatgtcacaatgtgactttttcttttactcaagggacatcgctgacgctgttgcaggagctgaaggccggaaaagtcgatctggcgatctgctcttatattgccgatgaacccgatatcgattttattccggtgatccagcaggaactggtggtggtcacggcaaaggatcatccgctggcccggctatatgaacatgaagtcgatctggtggagacgattcattatccgtatatctatttttcagaaaatagcggcttacgtccgtttatcgataatgtatttatgcagcaaaagctggtgccggagatcgcctgctatgtggatgaggatacggcgatggccgggctggtgagtattgactacgggatcgcgattatgccgcgcatcaccgcgctctcctattacaacgtccatatcctgaagattaaaaacaccatccccccccgctatatctatctggcgaccatgaaagacaaggggctctctccggcgctggagtcatttaaaaatgtggttatccacgacagccagaagatctgttaacggatggcccggatgtgacctccgggccatccggatatcaggagagaatatccatcacttcacgcagcttagcgatggcgatctgccccggcgcggaggcctgaccaacggtaccgaaggtcatcgccgaaccgaacaagcgcccggtgacccggctaacgccaccggatttgcccatcgacatggtgatcagcggacgcgtcgcatacttctctttcatggtcagcgtggcggcgagcaaggtgagtacgtcctgcggcgactgcggcatcaccgcgatcttcggcagatctgcccccagatcctgcatgcggcgcaggcgatagataatatcttcctgagcgggggtcttatggaaatcatgattactcatgatcaccttgacgcccgcggcatgcgcatcgtcaaccagcgcgcggatctgcgcttcatcattgaacagttcgatatcgataacatcaaccagtccactgcgtgcggcctcgcggttgagcgcaaaataggcttcgtcgctgagctcggtttcgccaccttctttcttactgcggaaggtaaatagcagcggaagcgctttcagcgcgccacggatttccgccagcgcggccatcacctgggccatctctctgacctgggcaaagtggtcaacgcgccattcgataatatcagcgccggcatcgaccaggccgtgggcgttacccagtatctcatccagggttttaccgatcagcggtacacaaatgagggtttccccttcctgaaaggtgatgttctttacggttactgcatttgtcatgtaggtatccattatttttcgcgttgtacttcaggcggtgactgcggtgcgtgacactttttgcgccgcccgagcctgcagttgacgatagccgatgtacagggcgatcacaaagccgataacggcgatcagaaaatcaaaccacataatgctggcaatactgatctgcgaaagctttgcggtgatcaacgggatcgtgaagctggcgatactgccggcggtgtagaagatgccggttgctttgccttttccgttcgggaagctcatcgccatgattgtcgcacccagctgcagcactccgccagcggcggcaaagccgatgacaaaagcaaagccggtcaccatcatcggcgtcgggaacaggcacaccaacagcagcgaaatcatcgacaggccagtataaataatcatcgcaatggccgagctaaacacctctttgacgaaggcggcagttacaaagacgcagaccagcgagccgacggtatagatgctaagcagtttaatcgccgaggcatagggcaggccgacgacgaactggccgtactgcgccagccattggctgaccagatagaaggtcgccatgccgatataaccgtacagggtgaagatcaccatatccagcttattagcctgtggccggacggctgtttccgcctgtgccgtaggggcttcctcttttttcgccgcctggctgtcagggaacggcattttaagcagataaatcccgctcagtacaaagagcgctgccgcaatcacgaacgaccagccgaaccacagatttgcccatatcaggaagctgataatgaacggcaacaggaactgccctgcagagacgaaggctttgatcagcacgttggcccggctggcagagtgcgggaaagattccatcagcgccggataggtaccggagtcgaggaagctgttcgccaggcccgccataatgccgaacacgtaagccagatagatatttttggtcagcaggatgccgacgaaaaagatcaggtagctaaggatcccaagatagataaagggcttgcgaccgaagcgatccgagagaaatccggtcacgatggtcgctaacttaccaatacctaacgaagatataacgatcgatacgccggctttgtctgttccccactgttcctgaagatgggccatgttgagggtgattaacagcacccccataccgtggatcaggtagttgagatacagccctgccgcagtagggatgtatttatttttcatcattcgcctcttagaacagaatgctcttgatgtaatcaaccggcatctgtttgcccgtccagatttcgaacgcgcgcgcgccttgccacagcatcatccccaggccgttcagcgtgcggcagccttttttctcggccacttccagcaggtgggttttgcgcgggttgtagacgacgtcggagacgatcaggtccggacgcaggaagctgtcgtcaggtagcagcatctggccttcgaacggcttcatgccgaccccggtggcattggtcaggatcacgctgctgtcaatttcggcgcgcagcttgtcatgatcgtcgagatcgaacagatggatctcgcagtcggtgttgtggcggatcttggccacggtttcttctgcgttggcgaagaatttatcgcggcggttgaagatggagatcgccttcacgccatccagtgctgcctggacgcagagtgccgttgccgcgccgccggcgccgagtacggtcatcttcttgccgatgatatcgataccggcttcgctaagggcgcgcatgtagccggtgccatcggtgatatgtccggtcagtacgccgtcgtcgttgaccacggtattgaccgccccgaccagctgtgccgccggcgacagtttatcgagatactggcaaatctcggttttgttcggcatagagacgttaaagccgcgcagcttcatcgcccggaagccctgcaccacgtcttttagctcctggttaccgacttcaaaagcgagatagacgtagtccagcccgagatgggcgaaagcctcgttgtgcatggtgggcgacatgctgtgacgaatcggggtggcgatcaggccaatcagctcagtgtgtccagtaatacgttctgccatgacaaaaatcctcaataagttagaaagggaattcgttgtgcttcgctgctgcccagcgcacccatgtcttccagtgcatccagtacgttgcggccttcgcggacgccatcgataatgcgtcgcgccatcacgctgtcgccgatgttcatgattttgacgttattggcattggcccagcgctcgatctcgtcgagacccgtccggttggcgcgcatccccagacagacaaagccgtagtcgaagggaatatcgaaggtttgctgtgtatttttcacctggaaatggtcggcagcgaccgccatcagttgggtattcatgtgctgttcgacctggtgctcgtcgagcatggtcaacatggcatttttggtaatgatgtcgagatcgcgaccggcggcgtcctgcatctcgattagcaccgcctgtgcgccgcgagcggtaaagtattcgataacgtcaaggccaacggcgccggcgccgactacggcgatgcgtttgcccttgatatcggtaaatttcgccagattgtcgatcatgccggtaatggaaaagatcttgccgttctcgacgtcaatgttttcccgcaagccttcaatgggcggcagcagcggcgttgagccggtggcgttgacaatcagatgcggacgcagggcggaaactgaagccacgtcggcccgcttgccgatctgcagcatcaggttgtccagcgaggcgatacgatttttcataaactgcgggaaatcagcgatgcgttttttctccggcaggcgggagatttcgctggcgaggccgccaacgtggtttttcgcttccagcagccaggtatggcaaccaacttccgccgcggtgcaggcggcttccatcccggcggtgccggcgccgatgaccaccacgttagtgtcgcgattcacgcgccgcattttataggcgtcaccgtgaataatatccgggttaatcgaacagcgcagcgggcgcgagcgggcgatgcgatggtcggcgcagccgatgttgcaggagatacatttgcgcatcagacgctcttttccgccttgcactttctgcacccactccggctcggcaatcagaccgcggccaatggcgataagatcggcatcgccgctggcgaggatatcttcggctacctgcggagtgcgaatattgccggcgatgaccgtgggtttatggaatttatcgcgcaccgcgcgggagagatagcgcttccagccatcctccagcgacatctgatcgatttgcagattcaggttatcgttctgcgccgcagagacgttgatgatatcgaccttctcctggcagagctcaagaatacgcagggaatcttcgagggtattgccgcccttgaggaagtcgtcggcgctgatgcgcaggctgaccggaaaacgcggccccacgcaggcgcgaaccttatcgacaatcagactcagtatccgagtgcgattttcgacgctgccgccaaattcatcagtgcgcttattaaacagcggcgataaaaactggctaattaaataggagtgaccggcatgaatttcgacgcagtcaaaacctgcgcgccgaacgcgctccgcggcgtcaccaaatttctctaccgcatgataaatttcctcatgggtcatcggacgcggaatattaccgtgcttcttcgacggcgttgtagaagaggagagcggcgtctggccttccagtcggtaggcataagcggaagcgccggcatgatttaactgaatggatacgcaggcgccatgtttatgcagggtctcggttaatttaaacagccgtggaatatattgatcgttatcgatgcgcagttgggtggtgccgttggaggcgaaggggaaatcaatacaaatattttcgatggtgataagcccagtgccgcctttggcccgcagttcgtagtattccagctgttcctgcgacacctcgccattgagcgtggccatattggtgcccataggggcataataatgcggttttttaacgtcataccgttgatggtcaacggactgaaaaggtgcggatagtggctcatctcttctctccacaggaggccgggaggccgatatgcggggcccaggcgtgtccttagttaatatttctctgtggcaaaagataacgaggggaaaaatcgaaaaataatgcttttttttgtgcatagccataggggttctctatgagattaacgctttcttcacattcttatatttttatattaaacactcgtgccttatttttacttgcagtgcagggaaaatacataaacagtgctggagaaggggaggaaagcggaataattcttctttaggcggtagggcagggtggcggtaaggtctgacaatcagcacattaaaattggtttttgtgcgtgagatcgcaattttctccgcaataaaataaaaagcccgatcaaatgaccgggcccaaaggttaattcataaatgccggcagcttgcgttcatagtcggagatcgccgcttcatgctgcagcgtcaggccgatgctatccaggccgttgagcatgcagtggcggcggaaatcgtcgatcttaaagctgtaggttttatccccggctttaactacctgcgcttccagatccacttcaaacgtaatgcccgggttggcctgcaccagcttgaacagctcgtcgacctgctcgtcgctcagggtcaccggcagcagctggttattgaagctgttgccgtaaaagatatcggcaaagctcggggcgataacgaccttaaagccgtaatcggtcagcgcccacggcgcgtgctcgcgcgaggagccgcagccgaagttttcccgcgccagcagtatcgatgccccctggtactcaggaaaattcagcacgaactccgggttcggctgttgacctttatcgtcgagaaagcgccagtcgttaaacaggtgcgcgccaaagccggtgcgggtgaccttctgcaaaaattgcttagggatgatcgcgtcggtatcgacgtttgcagcatccagcggaaccaccaggccggtatgttgggtaaatttctctgccatgatggtctccttacttcagattacggatatcggcgaaatggccggtaacggctgccgccgcggccattgccgggctcaccaggtgcgtgcgtccgccgcggccctgacggccttcaaagttacggttgctggttgaggcacagcgttcgcccggattcaggcggtcattattcattgccagacacatagagcaaccaggtaagcgccactcaaagccggcttcgataaagatcttatccagaccttccgcttccgcctgcgctttcaccggaccagaacccggcaccaccagcgcctggacgcccggcgccactttacgccctttagcaatttccgccgcggcgcgtaaatcttcgatgcgcgagttggtgcaggagccgataaacactttatcgatagcgacttccgtcagcgggatcccggatttcagccccatataggccagcgctttttcggcgctggcgcgttccaccggatcgctgaacgacgctggatcggggatgttatccgtcaccgagatcacctggcccgggttggtgccccaggtcacctgcggggcaatttccgccgcctgcagcgttaccacggtatcaaacgtcgcgccgtcgtcggttttcagggttttccagtacgctacggcatcgtcaaaatctttgcctttcggcgcatgcagacggccgcgtacgtaattgaaggtggtttcgtccggcgcgaccaggcccgctttggcgcccatctcgatcgccatgttgcacagggtcatacgcccttccatgctcagatcgcggatcgcttcgccgcagaactcaaccacatggccggtgccgccggcgctaccggttttaccaatgatggccagcacgatatctttggcggtaatgcccggcgccgctttgccctggacttcgattttcatggtcttcgcgcggccctgtttcagggtctgggtcgccagcacatgctccacttcggaggtgccgataccgaacgccagcgcaccgaacgcgccgtgggtggcggtatgggagtcaccgcacacgatcgtcatccccggcagggtaaccccttgttccgggcccatgacgtggacgatgccctgatacgggtggttcaggtcgtacagttcaacgccgaactctttacagttcttaatcagctcctgcatctgaatgcgggccatctcaccggacgcgttaatgtctttggtctgcgtcgagacgttatgatccatggtagcgaaggttttacccggctggcgcacctggcggccatgggcgcgcagaccgtcaaacgcctgcggagaggtgacttcgtgcaccagatggcggtcgatatacagcagcggggtttcgttctgcgcctcatacactacgtgcgcatcaaataatttttcgtataacgtcttcgccatgattacaccccttctgcgacatagcgggcaataatatcgcccatttcatcagtgctgaccgccgccgtgccgcgcgctaagtcgccggttcgaaccccttcttctaaggcgcggttgatcgcgttttcaatggcggtcgccgcttcgtcagcatcgaggctgtagcgcagcagcagagccagggagaggatctgcgcgatcgggttggcgatatttttgccggcgatatccggtgcggaaccgcccgccggctcgtacaggccaaaaccttgttcattgaggctggcggacggcagcatacccatcgagccggtgatcatcgcgcactcgtcggagaggatgtcgccaaacaggttggagcacagcagcacgtcgaactgggacggatctttaatcagctgcatggtggcgttatcgatatacatatgcgccagctcaacgtccggatactccttgccgatctcgctgacgatttcgcgccacaggatggaggactgcagaacgttggccttatcgatggaagtcactttgtgacgacgcttgcgggcggattcaaaagcgatgcgcgcgatacgctcgatctcaaagcggtgatacacctcggtatcaaaggctttctcatgctgaccgctgccttcgcggcctttcggctggccgaagtagatgccgccggtcagttcgcgtacgcagagaatgtcgaagccgttagcagcgatgtcggcgcgcagcgggcagaactcttccagcccctgatacagtttggccgggcgcaggttgctgaacagtttaaagtgtttacgcagcggcagcagcgcgccacgctctggttgttccgccggcggcaggtgctcccatttcggaccgccaacggagccgaacaggatcgcatccgcctgctcgcatccggcgacggtcgcctgcggcaggggagttccctgacggtcgatggccgccccgccaacgtcatactggctggtggtaatgtgcatggcaaaacgttggcgtacggcttccagtactttcatcgcctggttcatcacttccgggccaatgccatcacccggcaaaacggcaatatggtaattcttcgacattacacggtttccttattgttctctttattctgagctttgcgttgcaattctttttcgacttcggcggcgcgccagatgttgttcagcacgtgaaccatcgctttggctgacgactctacgatatccgttgccagaccaacgccatggaagcggcggccattgtagtcaacgacgatatccacctggcccagggcgtctttgccgtggcctttcgcgcttaagccatacttcactaattcaatgttgtagtcggtgacgcggttaatcgcctggtagatagcatcgaccggaccgttgccgttggcggcttcggttttgatctcatccccgcagaccagtttgatcgaggcggtggcgatatcgctggatccggattggacattgaagtaatccaggcggaaatgttctggctcttcctgctgcttgttgataaaggccagcgcttccagatcgtaatcgaagacctggccttttttgtccgccagcttcaggaatgcgtcgtacagatgatccaggttgtaatcgctctcctggtagcccatctcttccatccggtgtttcaccgccgcgcggccggagcgggaagtcaggttcagttgcacctggttcaggccgatagattccggggtcatgatctcgtagttttcgcggttcttcagcacgccgtcctggtgaatgccggaggagtgggcgaaggcgccggtgccgacgatggccttgttcgccgggatcggcatattgcagatctggctgacggtctggctggtgcgccagatttcatgatgattaatgttggtgtgcacgttcatgatgtctttgcgcactttgatcgccatgatcacttcttccagcgcgcagttgccggcgcgttcgccgataccgttcatcgcaccttctacctggcgcgcaccggcgtggaccgcggcgagggcgttaccgacagcgatgcccagatcatcatgggtgtggacggaaataattgctttgtcgatattcggcacgcgatcatacaggccgctgatgatgttggcatattcgaacggcatggtatagccgacggtatccgggatattaatggtggtggcgccggcgttgatcgccgcttccacgacgcgagccagatcggcaatcggcgtacggccggcgtcttcacaggagaactcaacgtcgtcagtgtagttgcgtgcccgcttcaccatatagatcgcgcgctcaataacctcatccagcgtactgcgcagtttggtggcgatatgcatcggcgaggtggcaataaaggtatgaatacggaaagcctcggccacttttaacgattccgccgccacgtcgatatctttctcaacgcagcgcgccagggcgcacacgcggctgtttttaatggtgcgcgcgatggtttgcaccgattcaaaatcgcccggtgaggataccgggaaaccgacttccattacgtcgacccccattcgctcaagggccagtgcgatctgcagcttctctttgacactcaggcttgcctgtaacgcttgttcgccatcacgtaaggtcgtatcgaaaataatgacttgctggctcatggtttggatccttagtctgtgtcctggcgccttgttgacgagcataaaaaaacccgcgccaaggcgcgggttttatagtcttgctggaagatgacttaacgctgaacgtcgcccaacagcctaccgcgcaaatggcatgcgtttagtagtagtaggctggtgatacgagcggtgcgaatcattgcatcaaactccagatgaaatcgttatgcttttagagttactggatagctgttttaaagtcaacccctggcatggaaaaagcgttttgggctgactaaatgaattagcaaaatgtgctgatgtaagccccattttgccgaagatcctattttggaccgaaggcggtttatccccatttgtttcatttgaaaaagtgctttgcattcaaggcatcgtcgaagaggtgtcgccaatgaagggacaaaaaacggtatctggatgaaaatattaaatttatttttcctgtgaatgtattcgaacgctagcggattatttttcaatgataaggatttgttaattttatggagggaaaaataaaatactttattattgcttaagttacagttaactcgtggtgctgtttttatttttatggattatggttacacttatcatcattaagtaatcagtatggtttgagcggctcaattttttgatcaggaccgtttcttcactgccactcatagccttgatatattcctaaaaatttcttttgctattttgtaaatgtcatttgcatggtaaatgatattttcggcgctaattatagcggtttagtgaagggaattcatcgtgacggcggaattagatatgttaattgaaactccagaatataaatcagcccccggacaggaagtcgttaaacctcaactacggatggttgatctcaatctgcttaccgtttttgatgcggttatgcaagagcagaatattactcgtgccgcccatacgctcggcatgtcacaacccgcggtgagcaatgcggtttcacgactgaaagtgatgtttaatgacgagctttttgtgcgctatggccgcggtattcagccgacggcgcgcgcctatcagctgtttggctcggtacgccaggcgctgcagctggtccaaaacgaattgccaggctccggttttgaaccgctgagcagtgagcgcgtgttccatctgtgcgtctgcagcccgctggataacatcctgacgtcggttatttttaataaagttgcagagatagcacccaatattcatttagtctttaagtctgcgctgaatcaaaatacggaacatcagctacgttatcaggaaacagaattcgtaatcggttatgaagagttccgtcgccctgagtttgcctgcgttccgttatttaaagacgaaatggtcctggtcgccagtcgcaaccatccgcgtatttccgggccgatgatggaggcggatatttatcgcgaggagcatgccgccgttgctctcgaccggtatgcctcatttagtttgccgtggtatgacacggccgataaacaagcgcgtatcgcctatcagggtaatgcgatggtcagcgtattaaacgtagtatcgcaaacccagatggtggccattgccccgcgctggctggcagatgaatttgctgacaagcttgccctgcaaatattacctttgccgttgaaggtcaacagtcggacctgctatctctcctggcacgaagccgctggtcgtgataaaggccaccagtggatggaagagctgttggtggacatttgcaagcgctgacccgacgacgatagatagcaaggagcttcggctcctttttttatatgacataaatcaaataaagcagaattttattctgtttaccttgcgcgaggggttcgttgtgttcgtgaaaaatggatctattcctgttatcaccctttttcgccgagtatttaccattctcttttcttatctctgaagcaattcaccatattttcccctcaccgctttcttttcttcttattcaagaaataaggcctcagctgcggcgaattgcctgcctgctggcgagcagttatggtagtggcatgcagtacattcacctcaatgcggaggaccactccttcgcatcgtgcgagcgcgcggaaattgagttccgctgtcgtaaaacaataagcctggaggcaaaccatggagatgttgtcaggagccgagatggtcgtccaatcgcttgtcgatcagggcgtcaagcaagtattcggctatcccggaggcgcagtcctcgatatctatgatgcgttacatacccttggcggtatcgatcatgtgctggttcgtcacgagcaggcggcggtgcatatggcggatggcctggcgcgggcgaccggggaggtcggcgtggtgctggtgacctctgggcctggggcgacgaacgccatcactggcattgcgacagcctatatggactctattccgttggtgatcctctcggggcaggtagccacctcgcttatcggctacgatgccttccaggagtgcgacatggtggggatttcccgtccggtggtgaagcacagtttcctggtgaagcagaccgaagatattcccggcgtgctgaagaaagccttctggctggcggccagcggtcgccccggtccggtagtggtcgatctgccgaaggatattctcaatccggcgaagaagctgccttacgtctggccggacgcagtgagcatgcgctcgtataacccaaccaccagtggccataaagggcagattaaacgcgccctgcagaccctggtggccgcaagtaagccggtcgtctacgtcggcggcggggcgatcaatgcgcattgcgaacctcagctgcgcgagctggtggaaaaactgaagctgccggtggcctcatccttgatgggacttggcgctttcccggcgacacactcgcaggcgctggggatgctggggatgcacggcacctatgaagccaacatgaccatgcaccactcggacgtgatttttgccgtcggcgttcgctttgacgaccggaccaccaataacctggccaagtattgtccgaacgcgacggtactgcatattgatatcgatccgacttcaatctcgaaaaccgtgccggcagatgtgccgatcgtcggcgatgcccggctggtgctggagcagatgctggagctgctggagcaggaggaagcgcagcagccgctggacgacattcgcgactggtggcaacagatcgagcagtggcgtgcccgtcattgtctgcgctacgacgaccagagcgataaaatcaaaccgcaggcggtaattgaaactatctggcggctgacccagggcgatgcctacgtcacttccgatgtgggtcagcatcagatgttcgccgccctgtattaccccttcgataaaccgcggcgctggattaactccggtggtctcggcaccatgggctttggcctaccggctgcgctgggggtcaaaatggctctgccggacgaaatggtggtctgcgtgaccggtgacggcagtatccagatgaacattcaggaactctccactgcgctgcagtatgagctgccggtcctggtgcttaacctcaacaaccgctatctcgggatggtgaagcagtggcaggatatgctctattccgggcgtcactcgcagtcctatatggaatcgctaccggactttgtccgtctggcggaagcctatggccacgtcgggatccgcatcagcgagccgcaggagctggagacgaagcttgctgaagctctggagcaggtgcgccagcgtcggctggtgtttgtcgatgtgaccgtcgacggcagtgagcatgtgtaccccatgcagatccgcggcggcggcatggatgaaatgtggttgagcaaaacggagaggacctgattatgcgccggatattatcggtattactggaaaacgaatcgggtgcattgtcccgcgttatcggcctcttttcccagcgtggctataatatagaaagcctgactgtcgcgccgacggacgatcccactctctccagaatgaccattcagaccgtgggcgatgaaaaagcgattgagcagattgaaaagcaactgcacaagctggtggatgtcctgcgggtcagcgagctggggcagggggctcatgttgaacgcgaaattatgctggtgaaggttcaggccagcggctatggccgtgaagaagtgaagcgcaacaccgaaatcttccgcggacagattatcgacgtgacgccttctatctataccgtccagctcgccggcaccagcgataagctggatgcatttctggcctcgctgcgcgatgtcgctcggattgtggaagtggctcgctccggcgtggtcggcctgtctcgcggtgataaaatcatgcgctaaggatcgggaactgctgtaaaaatagcccggcagagactgtcgggctttttttttgcgaaatcagtaggaactgtaagcgaaagcggttgctgcgctaactattctgcgcttagatgttataaaaaggattccatacctgaataatggttatgtttggcacttcttacccaaggggcaattgtgaaactggatgaaatcgcccggctggccggtgtttcaagaaccaccgcgagctatgtgattaatggcaaagcgaagcagtaccgcgtaagcgataaaacggtcgaaaaagtgatggctgtggtgcgagagcacaactatcacccaaatgcggtcgctgctggcctgcgtgcaggacgcacacgctctatcggtctggtgatcccggatctggaaaacaccagctatacccggattgcaaattatctcgaacgtcaggcgcgtcagcgcggctatcagctgctgattgcctgctcggaggatcagcccgataacgagatgcgctgcatcgagcatctgctgcagcgccaggtggacgctatcattgtctctacttcgctgccgccggagcatcctttttatcagcgctgggctaacgacccgtttccgattgtcgccctcgaccgcgccctcgatcgcgagcacttcaccagcgtggttggcgctgaccaggatgacgccgagatgctcgcagctgagctgcggacgtttcctggcgaaacggtgctctatctcggcgcgctgccggagctgtcggtgagcttcctgcgcgaacagggcttccgtaaagcctggcaggacgatccgcgtgaggtgcattatctctatgccaacagctatgagcgcgaagcggcggcccagctgtttgagaaatggcttgaaacccatccgatgccacaggcgctgtttaccacctctttcccgctgctgcagggcgtaatggatgtgaccttgcgtcgcgagggtaaactgccctccgagctggcgatcgccaccttcggtgataatgagctgctcgattttctgcagtgtccggtactggccgtggcccagcgtcatcgcgatgtcgctgagcgggtgctggagattgtcctcgccagcctcgacgaacctcgcaagccgaagccgggtcttagccgtattcgccgtaatctctatcgtcgcggtagcctgaatcgccgctaagggcgccatatcgccagcgcccaggtataaacctggcaggcctgaccgtaagcaggccgctggcgataaatcaggcaattgacgtgcaaaatgcaaaactgaatatatttcagacaaatccctaaacttctttactcgttattttattttattcactgaccatcgttttgtgactccaaatggggtacaaaaaatgactgcgcggactttaattgtattattttgttacattcatcaggttaattgctgaattaacactcattttgtacgcgccacgctttcttccccgtcatatcccgcgcctggccagtccctctgccagcaacaggtactgttaacggccggcataatggcctaaaatgccgctcgcgtcgcaaactgacactttatattttcccgccgaagatattctgttgtttataactgttacgagtttgttggttattttcttacacgtattcataacgttaatttgcctcgcctgttgatgattttttcatcagggctaatgtcggctgtaaataatgggtttttgagctccgttggcatccgtgctggcttgacaagcttttcctccgctccgtaaactccttctggtgggaatttgtggggtaaagtggcgaaaaggggtgaggctggcatgttccgtggagcaacgttagtcaatctcgacagcaaaggccgcctggccgtgccaacgcgctatcgcgaagggctgatcgaggacgctgccggtcaattggtatgcaccattgacattcatcacccgtgcctgctgctttatccattgcctgaatgggaagtcatcgagcagaaattgtcgcgtttatcgagcatgaatcccgttgagcggcgcgtacagcgtttgcttttgggtcatgccagcgaatgtcagatggataatgccggccgcttgctgattgcgccggtgttacggcagcatgccgggctgacaaaagaagtgatgctggtcgggcagtttaataaatttgaactgtgggatgaaacgacctggtatcaacgggtcaaggaagatatcgacgctgagcagtccgcgaccggtgaactgtcggagcgcctgcaggatttgtccttataaaaatgatggaaaattataaacatactacggtacttctggatgaagccgtcaacggcctcaatattcgtccagacggtatctatattgatggtacttttggccgcggcggtcactcgcgcctgatcctctcccggctgggtgcggaaggacgcttgctggctatcgatcgcgacccgcaggcgattgccgtcgcgcaaaccatcgatgacccccgcttttccatcgtacatggtcccttttcacaactcgctgagtacgtcggcgagcgcaatcttaccggtaagatcgacggcattctgctcgatctcggcgtctcttccccgcagcttgacgatgcggaacgcggcttttcctttatgcgtgacgggccgctggatatgcgcatggatccgacgcgcggtcagtccgcggccgaatggctgcagacggctgaagaagacgatatcgcctgggtgattaaaacctttggcgaagagcgtttcggcaaacgtatcgcccgcgcgatcgtcgaacgtaatcgcattcagccgatgacccgcaccaaagagctggcggaagtcatcgccgcggcgatgccggtaaaagataagcacaaacatcccgcgacccgtaccttccaggcggtgcgcatatgggtaaacagtgaactggaggagatagagcaggcgctaaaaagctcgctcagcgtgctggccccgggcgggcggctgtcgatcattagttttcattcgctggaagatcgcattgtgaagcgctttatgcgtgagcaaagccgcggtccgcaggttccggcgggaataccgatgaccgaagcgcagctcaaaaaactgggcggccgtgagttgcgagcactaggcaagttgatgccgggcgaagaagaggtggcagagaatccacgcgcccgtagttcagtgctgcgtatcgcagagaggacgaacgcatgatcggcagagtgacagaggccttaagcaaggttaaagggtcgattggaagcaacgagcgccatgctttgcctggcgtgatcggggacgaccttctgcggtttgggaaactgccactctgcctgttcatttgcatcattattacggcgattaccgtggtcaccactgcgcatcacacgcgcctgttgaccgcgcagcgtgaacagctggttctggagcgcgacgccctggatattgagtggcgcaacctgatcctcgaagagaacgcgctcggcgatcacagtcgggttgagcggatcgcgaccgagaagttacagatgcaacacgtcgatccatcacaagaaaatatcgttgtacagaaataaggattattgcgacggatgaaagcagcgccaaaaacgcctaaagcaaaacgtcaggaagaacaggccaactttatcagttggcgttttgcgttgctgtgcggctgtattctgctggcgctggcttttctgctgggtcgcgtcgcctggctacaggtgatcagccccgatatgctggtgcgccagggcgatatgcgttctctgcgcgtacaggaagtgtccaccgcgcgcgggatgattaccgatcgctccggacgtccgctggcggtcagcgtgccggtgaaggctatctgggccgacccgaaagagctccatgacgccggcggggttaccctggatacgcgctggaaagcgctggcggatgccctcaatatgccgctggatcagctggcgacgcgcatcaataccaatccgcggatgcggtttatctatctggcgcgtcaggttaaccctgacatggccgattacatcaagaagctgaagctgccgggcattcatctgcgcgaagaatcccgtcgttactacccttccggggaagtaaccgctcacctcatcggctttaccaacgtcgatagccaggggattgaaggggttgagaaaagctttgataaatggcttaccggtcagccgggcgagcgtatcgtacgtaaagaccgctatggccgggtaattgaagacatctcttctaccgatagccaggcagcgcacaacctggcgctgagtatcgacgaacgcctgcaggcgctggtctatcgcgagctaaacaacgccgtggcctttaacaaagccgagtcgggcagcgccgtgttagtggatgttaacaccggtgaagtgctggcgatggccaacagcccatcctataacccgaacaacttcgccggtacggcaaaagacaccatgcgtaaccgtgcgattaccgacgtgtttgagccgggttcgacggtgaaaccgatggtggtcatgacggcgctgcagcgcggtatcgtcaacgaaaataccgtgctcaataccgtgccttatcgaattaacggccacgaaatcaaagacgtggcgcgctacagcgaattgaccctgaccggggtgctacagaagtcgagtaacgtcggtgtttctaagctggcgttagcgatgccgtcctcagcgttagtagatacttactcacgttttgggcttggaaaggcgaccaatttggggttggtcggagaacgcagtggcttatatcctcaaaaacaacggtggtctgacatagagagggccaccttttctttcggctatgggctaatggtaaccccgttacagttagcgcgagtctacgcaacgattggcagctatggcatctatcgcccgttgtcgattaccaaggttgatcctccggttccgggcgagcgcgtcttcccggaatcactcgttcgtaccgtcgttcatatgatggaaagcgtggcgctgcccggcggcggcggtgtgaaagcggcgatcaaaggctatcgtatcgcgattaaaaccggtacggcgaaaaaagtggggccggatggccgctatatcaacaaatatattgcttacaccgcaggcgttgcgcccgccagccatccgcgcttcgcgctggtggtggtgatcaacgacccgcaggcaggtaaatactacggtggcgccgtttccgcgccggtcttcggtgccatcatgggcggcgtattgcgcaccatgaacatcgagccggatgcgctggcaacgggcgaaaaaagtgaatttgtaattaatcaaggcgagggaacaggtggcagatcgtaatttgcgcgacctactcgctccatgggtgccaaacgcaccggagcgcattctgcgagagatgacgctggacagccgggtggctgcttccggcgatctctttatcgcggtacagggtcatcaggcggacgggcgtcgttatatcccgcaggcgatagcgcaaggtgtggctgccattattgctgaagcgcagggcgaagctaaagacggtgagatctgtgaaatacacggcgtgccggttatctacctgagccagcttaacgaacgcttatcggcgctggccgggcgtttttatcatcagccgtcgcagcagctgcgtctggtgggcgtcaccggcaccaacgggaaaaccaccaccactcagctgctggcgcagtgggcaaagctgctcggcgaaaccagcgcggtgatggggaccgtcggtaacggtctgctggataaagtcgttccaactgaaaacaccaccggttccgcggtggacgttcaacatgtgctctccagtctggtcgggcagggggctaccttcggcgcgatggaagtctcctcccacggtctggtacagcaccgcgtagcggccctgcagtttgccgcctcggtgtttaccaatctcagccgcgatcatctcgactaccatggcgacatggagcactacgaagcggcgaaatggatgctgtactccacccatcattgcggtcaggccatcgtcaatgctgacgatgaagtcggtcgtcgctggctggcaaaactgccggacgcggtggcggtatcgatggaagatcatatcaacccgaattgccacggccgctggctaaaggccaccgcggtgaactatcacgacagcggggcgaccatccagtttgactccagctggggcaagggcgaaatcgaaagccgcctgatgggcgcatttaacgtcagcaacctgctgctggcgctggccacgctgctggcgctgggctatccgctggccgatctgctgaagagcgcagcgcgtttacagccggtgtgcggccgtatggaagtgttcagcgcgccgggtaaacctgccgtggtggtagattatgcccatacgcctgacgcgctggaaaaagcgctgcaggcggcacgcctgcactgcagcggcaagctgtggtgcgtcttcggctgcggcggcgaccgcgacaaaggtaaacgtccgttgatgggcgctatcgcggaagaatttgccgacatcgtggtcgttactgacgataacccgcgcaccgaagagccgcgggcgattatcaacgatattctggccggcatgctcgatgcaggtcaggcgaaggtgatggaaggccgcgcggaagcggtgaccaacgccgtgatgcaggcgaaagagaacgacgtggtgctggtggcgggtaaaggccatgaagattaccagatcgtcggcaaccgccgtctggattattccgaccgcgtgaccgtcgcgcgtctgctgggagcggtagcatgattcgctttacgttaagtcaacttgccgcgatcgcccatggcgaacggcagggtagcgatgtcgctatcgacgaggtgaccaccgatacccgtaaagtgacggcgggctgcctgtttgtggcgctgaaaggggagcgtttcgacgcccatgattttgccgaacaggcgaaagcggcgggcgccggcgcgctgctggtgagtcgtccgctggcctgcgatctcccgcaggtgattgtgaacgatacccggcaggctttcggtgagttagccgcctgggtgcgtcagcaggtgccgactcgcgtcgtcgccctgaccggctcgtccggtaaaacctcggttaaagagatgaccgcggcgatcctcagccagtgcggcaacacgctgtataccgccggcaacctgaacaacgatatcggcgtcccgatgacgctgctgcggctgaccaaagagcatcagtacgcggtgatcgaactcggcgccaaccaccagggcgaaatcgcctggaccgtcagcctgacgcgtccggaagcggcgctggtcaacaaccttgctgcggcgcacctggaaggtttcggttcgctggcgggcgtggcgaaggcgaagggcgaaatctataccggtctgccggaaaatggcatcgccatcctcaatgccgacaataacgactggctgaactggcaggcggtgattggcgatcgcaaagtgtggcgcttctcgccgaacgcggcgaacagcgatttcacggcgaccaacgtgcagatcaccagccacggcaccgaatttacgctgcagaccccaaccggcaacgttgacgtactgctgccgctgccgggacgccacaacatcgctaatgcgctggccgccacttcgctggcgatggcggtaggcgccgatttggcggcggtgaaagccggactggcgcagctgcaggccgttccgggacgtctgttcccgatccggctgaccgagagccagctgctgctggatgattcctataacgctaacgttggttcgatgaccgcggcggtgcaggtgctgtcagagatgcccggctttcgcacgatggtggtcggcgatatggcagagcttggcgcggagagcgcggcctgccatcgcgaagtcggcgaagcggcgaaagcggcggggctggattgcgtcctcagcgtcggcgccttgagcgcggatatcagccgcgccagcggcgtgggcgaacattttaacgataaagccgccgtggtggctcgcctgcgcgagctgctggcggagcacaaaataatgaccattttagtgaagggttcacgtagtgccgccatggaagaggtagtacgcgcattacaggagactgggacatgttagtatggctggccgaacacttggtcaaatattattccggctttaacgtcttttcttatctgacgtttcgcgccatcgtcagcctgctgaccgcgctgttcatctcgttgtggatgggcccgcgcatgatcgcccgtctgcaaaaactcgcctttggccaggtcgtacgtaacgacggcccggagtctcatttcagtaaacgcggtactccgaccatgggcgggatcatgatcctcaccgcgatcaccgtttccgttctgctgtgggcctatccatctaacccgtacgtctggtgcgtactgacggtattaatcggctacggcatcatcggtttcgttgatgattaccgtaaagtcgtgcgcaaagataccaaaggcctgatcgcccgctggaagtatttctggatgtcggtgatcgccctgggcgtggccttcgcgctgtatctggcggggaaagataccccggcaaccgagctggtggtgccgttctttaaagacgtaatgccgcagctggggctgttctatatcttgctggcctacttcgttatcgtcggtaccggcaacgccgtcaacctgaccgacggcctcgacggcctggcgattatgccgaccgttttcgtcgcggcaggctttgcgctggtggcatgggccaccggcaacatgaatttcgccaactacctgcatatcccgtatctgcgccacgccggcgagctggtgatcgtctgtacggcgattgtcggggcggggctgggcttcctgtggttcaacacctacccggcgcaagtctttatgggcgacgtcggttcactggcgctcggcggcgcgttgggcattatcgccgtgctgctgcgtcaggagttcctgctggtgatcatgggcggggttttcgtggtggaaacgctgtcggttattctgcaggtcggctcctttaagctgcgcggtcagcgcatcttccgcatggcgccgatccaccaccactatgaactgaaaggctggccggagccgcgcgttatcgtgcgcttctggattatttcgctgatgctggtgctgattggcctggcgacgctgaaggtacgttaatcatggcagattatcagggtaaaaaagtcgtcataattgggctgggcatgaccggcctgtcatgcgtggactttttcatggcgcgcggcgtaaccccgcgcgtgatggacacccgcgtcgcgcctccggggctggataaattacccgaatcggtcgaatgccatgtcggcggactcaatgatacctggctgctggcggcggacctgattgtcgccagtccgggaattgcgctggcccatccttcgctcagcgcagcggccgacgctggcgtagagatcgttggcgatatcgaactgttctgccgcgaagcgcaggcgccgattatcgccattaccggttctaacggcaaaagcactgttactaccctggtgggcgagatggcgaaagccgctggagttaacgtcggcgtgggcggcaatatcggcctgccggcgctgatgttgctggacaccgatcgagagctgtatgtgctggagctctccagcttccagctggaaaccacctccagcctgcaggcggtggcggcaaccatcctcaacgtgactgaggaccatatggaccgctacccgctgggactgcagcagtatcgcgcggcgaagctgcggatttacgagaatgcgaagacctgcgtggtgaacgcggacgatgcgctcaccatgccggtacgcggggcggacgaacgctgcattagctttggcgtcgatgtcggtgactaccaccttaaccgccagcagggcgaaacctggctgcgcgttaaaggtgagaaagtcctcaatgtgaaagagatgcctctcaccggtcagcataactacagcaacgccctggcggcgctggcgctggccgatgccgcgggtctgccgcgggccagcagcctgaaggcgctgaccacctttaccggtctggcgcaccgtttccagctggtgctggatcacaacggcgtacgctggattaacgactcgaaggcgaccaacgtcggcagcaccgaggcggcgctgaacggcctgcagctggacggcacgctctatctgctgctgggcggcgacggcaagtccgctgattttaccccgctgaagcgctacctcggcggcgatcgtattcgcctgtactgctttggtcgcgatggcgccgagctcgctgagctgcgtcctgaggtggcggtacaaactgagactatggaacaggcgatgcgtcagattgctcccctggtgaaagcgggggacatggtgctcctgtcgccggcctgcgctagcctggatcagtttaagaactttgaacaacggggcgagatgtttgcccgtctggcgaaggagttaggttgatgcgtttctctctcccacgcctgagaatgccgcagctgagcctgcctcggctgagactgccgcgattgccggggatgtttattttcgcctggctattcgctgcgctgaaaggctgggtgatgggctcgcgcccgaaagataacgacagtctggtgatgtatgaccggatgctgctatggctgaccttcggcctggcggcgatcggctttattatggtgacctcggcgtcgatgccggtcggacagcgcctggcgaacgatcctttcctcttcgccaagcgtgacggcctgtacattgtgctggccttcgcgctggcgatgattacgctacgtctgccgatggatttctggcagcgccacagtaccgcgatgctgatcgcctcgatcgtcatgctgctgatcgtactggtagtaggcagctcggtaaacggcgcatcgcgctggatagcccttggtccgctgcgtattcagccggcggagttcaccaagctgtcgctgttctgctacatcgccaactatctggtgcgtaaagccgacgaagtgcgtaacaacctgcgcggcttcttaaaaccgatgggcgtgattttcgtactggccatcctgctgctggcgcagcctgacctcggtaccgtggtggtcctgttcgtcaccacgctggcgatgctgtttctcgccggcgcgaagctgtggcagttcatcgccattatcggcatgggtatttcggcggtggtcctgctgatcctcgccgaaccataccgtattcgccgcgtgacctccttctggaacccgtgggaagacccgttcggcagcggctaccagctgacccagtcgctgatggctttcggccgcggcgagatgtgggggcagggcctcggcaactcggtgcaaaaactggagtatttaccggaagcgcacactgactttatcttcgccattatcggcgaagaactcggttatatcggtgtggtactggcgcttttaatggtattcttcgtcgctttccgcgccatgtcgattggccgtaaagcgctggagatcgatcatcgcttttccggcttcctcgcctgtgcgattggtatctggtttagcttccaggcgttagttaacgtcggcgcggcggcggggatgctgccgacgaaaggtctgacgctgccgctgatcagttatggtggttccagtctgttgattatgtcgacggccattatgttgttgttgcgaattgattatgaaacgcgtctggaaaaagcccaggcgtttacacggggtgtgcgatgagcggtcaggaaaagcggttgatggtgatggcgggcggtaccggcgggcatgtgttcccgggactggcggtcgcgcaccatttaatggaccagggctggcaggttcgctggctgggtaccgccgatcgtatggaagcggatttagtgccgaaaaacggcatcgaaattgattttatccgcatctccggcctgcgtggcaaaggtatcaaagcgcagctactggcgccggtgcgtatctttaacgcctggcgtcaggcgcgggcgatcatgaagcgtttccagccggacgtggtgctgggcatgggcggctatgtttccgggcctggcggtctggcggcgtggtcgctggggatcccggtggtcctccacgagcaaaacggcattgccggcctgactaacaagtggctggcgaagattgcgaagaaagtgatgcaggcgtttcccggcgcgttcccgcatgcggacgtcgttgggaacccggtgcgcacagatgtactggcgctaccgctgccaggtcagcgtctggttggccgtcagggaccgattcgcgtgctggtggtcggtggctctcagggcgcgcgcgtcctgaaccagacgatgccgcaggtggcggcgaagctcggcgctacggtgaccatctggcatcaaagcggcaaaggcggccagcaaaccgtgcagcaggcctatgccgccgccggacagccgcagcataaagtgacggaatttattgatgacatggccgcggcgtatgcctgggcagatgttgtggtttgccgttccggcgcgctgacggttagcgaaatcgcggccgcaggtttaccagcgctgtttgtcccgttccagcacaaagatcgtcagcagtactggaatgcgctgccgctggagaaagccggcgcggcgaaaattcttgaacagcctgagttcacggtagaggcggttgcctctaccctggcgagctgggatcgggaaaccttgctggatatggcggaacgagcgcgtggcgcttcgattccggacgctaccgagcgggtagcagaagaggtcagcgccgtagctttggcgcgctaattgcggtgattttcaccgcccgaatacagaagttgatggcgtaaagaatgaatacacaagatttggcaaaactgcgttccatagtgcccgagatgcgtcgcgttcggcacattcactttgtcggcatcggcggtgccggtatgggcggtattgccgaagtgttggctaacgaaggttaccagatcagcggctccgacctggcgccgaatccggtgacccagcagctgtcgcagcttggcgccaccatttatttcaaccatcgcccggaaaacgtgcgtgatgccagcgtggttgtcgtttccagcgcgatttcggcagataacccggaaatcgttgccgcgcatgaggcgcgtatcccggtgatccgtcgtgccgaaatgctggcggaacttatgcgctttcgccacgggatcgccattgccgggacccacggcaaaaccaccaccaccgcgatggtatccagcatttacgccgaggccgggctggacccgaccttcgtcaacggcggactggtaaaagcggcgggcgtacatgcccgtcttggccatagccgttacctgatcgcggaagcggatgagagcgacgcgtcgtttctgcatctgcagccgatggtggccattgtcaccaacatcgaagccgatcacatggatacctaccatggcgactttgagaatctgaagcagacatttatcaacttcctgcacaacctgccgttctacggacgcgcggtgatgtgcgtggacgatccggtgatccgggaactgctgccgcgcgttggccggcagatcaccacctacggttttagcgacgacgccgacgtgcgcgtcgaggactatcgtcaggttggggcgcaggggcatttccgcctggtacgccaggataaagcgatcctgcaggtgacgctcaatgccccgggacgccataacgcgctgaacgcggcggcggccgtcgccgtggcgacggaagaggggattgacgatcgggctattctgcgcgcactggagagcttccagggaactggacgccgctttgattttcttggcgagtttccgctggccgaagtcaacggcaaaccgggcagcgcgatgctgatcgatgattacggtcaccacccgacggaagtggacgccaccattaaagcagcgcgcgccggctggccggataaaaacctggtgatggtattccagccgcaccgttatacccgtacccgcgatctgtatgatgattttgccaacgtgctgacccaggtggatgccctgctgatgctggacgtctatccggcgggcgaagcgccgatcccgggcgccgacagccgctcgctgtgccgcaccattcgcggtcgcgggaaagtggatccgatcctggtgcccgattcggcccaggccgcggagatgctggcgtcagtcctgaccggcaacgatttagtactggtgcagggcgccggtaacatcggtaaaatcgcccgccacctggctgaaatcaaactgatcccgcaaaaaacggaggaggagcgccatggctgataaaatcgcggtgcttttcggtggaacctccgctgaacgtgaagtgtcgctgaattcaggcgcggcggtgctggccgggctgcgtgaaggcggggtggacgcccatccggtcgacccgcgcgatgttgatattacccagctaaaaaagcagggctttaagaaagcgtttattgccctccacggccgcggcggggaagatggcactctgcaggggctgctggagttaatccagctgccttataccggcagcggcgtgatggcttcggcgatttcaatggataagctgcgcagcaagtggctgtggcagggcgccggattaccggtcgcgccgtgggtggcgctgacccgcgcccagtttgccgccgggctgtctactgacgtcgaacagcaaattgcggcgctgggtctgccggtcatcatcaagccgagccgtgaaggctccagcgtcgggatgtcgaaagtcagcgaaagttgtgatttagcaagtgcattggcgttggcttttcagcatgatgatgaagttttggtcgaaaaatggctcagtggaccggaatttaccgtcgccatagtcggtgaagaaattttaccgtcaatacgtatccaggccgcgggaaccttctatgattatgaggcgaagtatctctctgatgagacgcaatatttctgcccaggatttgaagatcccgcgcgtgagtccgctattcagaacctggtgcttaaagcctggaatgttctgggttgcaaaggctggggccgtattgacgtgatgctggacagcgatggccagttttatctgctggaagcgaatacttccccgggcatgaccagccacagccttgtgccaatggcggcgcgtcaggcaggaatgagcttctcccagcttgttgtacgaattctggacctggcggggtgatatgtcgcaggctgcgctgaatacgcggaaccatgaagaagaggcttcttcttcgcgtcggagtaatggaacgcggctggcagggatcgttttcctgctggcggtgctgtttaccgtgctggtcagcgggtggatggttcttggctggatggaagatgcgcagcgcttaccgctgtcgaagatggtggtgaccggcgagcgtcactatacgcgcaatgatgacatccgtcaggcgatcctggcgctgggttcgccgggtacctttatgactcaggatgtgaacatcatccagagccagattgaacgtctgccgtggattaagcaggcgagcgtccgaaagcagtggcccgatgaattgaagattcatctggttgaatatgtgccgattgcgcgctggaatgatcaacatatggtggatgcagaaggaaatgccttcagcgtgccggcggatcgcaccagcaaacagaatttaccgatgttatacggtcccgaaggcagcgagaacgaagtgctgcaggggtatcgtgacatggggcaggtgctggcaaaggataaattcacgttgaaagtggcggcgatgaccgcccgtcgctcctggcagttgacgcttaataatgacatcaagctcaaccttggccgtggcgataccatgaaacggcttcagcgctttatggaactctacccggttcttcagcagcaggcgcagaccgacggcaaacggattagctacgttgatttgcgttatgactcgggtgcggcagtgggctgggtacctgctcccgcagaggaaactaatcaacaacagaatcaggcacaggcagaacaacaatgatcaaggcgacggacagaaaactggtagttggactggagattggcaccgccaaggtggccgctttagtaggggaagttctgcccgacggcatgatcaatatcatcggcgtgggcagttgcccatcgcgtggtatggataaaggcggtgtgaacgacctcgagtcggtggtgaaatgcgtacagcgcgccatcgaccaggccgaactgatggcggattgccagatttcatcagtttatttggcactttcgggtaaacatataagctgtcagaatgaaatcgggatggtaccgatttcggaagaagaagtgacgcaggacgacgtcgagaacgtggtccacaccgcgaagtcggttcgcgttcgcgatgaacatcgtgtcctgcacgtgattccgcaggaatatgctatcgactaccaggaagggattaaaaacccggtagggctgtccggcgtgcgtatgcaggcgaaggtgcatctgatcacctgccataacgatatggcaaaaaacattgttaaagcagtggaacgttgtggtctgaaagttgaccaacttattttcgccgggttagcggccagttattcggtattaacagaagacgaacgtgagctgggcgtctgcgttgtggatatcggcggtggtacaatggatatcgccgtctacaccggcggcgcattgcgtcacaccaaagtgatcccgtatgccggtaacgtggtgaccagcgatatcgcctatgccttcggtacgccgccgagcgatgccgaagcgattaaggttcgtcacggatgcgcattgggttccatcgtcggtaaagacgaaaacgtcgaagtaccgagcgttggtggacgtccgccgcgtagcctgcagcgtcagacgttggcagaggtgattgaaccgcgctataccgagctgcttaacctggtcaatgaagagatcctgcagctgcaggaacagctccgccagcagggtgttaaacatcatctggcggcggggattgtgttaaccggcggcgcggcgcaaattgaaggtctggcggcctgtgcgcagcgcgtgttccatactcaggtgcgcattggcgcgccgctgaacatcaccggtttaaccgactatgcccaggagccgtattattcaacggcggtggggctgctgcactacggaaaagagtcacatctcagtggtgaagcggaagtagaaaaacgcgtgacggcctcagtgggctcgtggattaagcgactcaacagctggctgcgaaaagagttttaattttttaagagaacgcagacaattagcgttctcaggcgacaggcacaagacggagagaaactatgtttgaacctatggaactgaccaacgacgcggtgattaaagtcatcggcgtcggtggcggcggcggtaacgccgttgaacacatggtgcgcgagcgcattgagggtgttgaattcttcgcggtaaataccgatgcgcaggcgctgcgtaagacggcggttggccagactatccagatcggtagcggtattaccaaaggtctgggcgcgggcgcgaacccggaagtcggccgtaacgcggctgatgaagaccgtgaagcgctgcgcgcagcccttgatggcgcagacatggtgttcatcgcggcaggcatgggcggcggtaccggtaccggcgcggcgcccgtagtcgcggaagtggcgaaagatctggggatcctcaccgttgcggtggtcactaagccgtttaattttgaaggtaagaagcgcatggcgttcgctgagcaggggatcaccgagctgtccaagcacgttgactcactgatcaccatcccgaacgacaagctgctgaaggtcctgggtcgtggaatttccctgctcgacgcattcggcgcggcaaacgacgtcctgaaaggcgcggtgcagggtatcgccgaactgatcacccgtccgggtctgatgaacgtcgacttcgcggacgtccgtaccgtgatgtctgaaatgggctacgcgatgatgggctccggggtggcgagcggtgaagaccgtgcggaagaagcggctgaaatggctatctcttctccgctgctggaagatatcgacctgtcaggcgcgcgcggcgtgctggtcaacattactgcgggcttcgacctgcgtctggacgagttcgaaactgtgggtaacaccatccgtgcttttgcctcggataatgcgacagtggttatcggtacctctctggacccggatatgaacgacgagctgcgcgtgaccgtagtggcgaccggtattggcatggataagcgtccggaaatcaccctggtaaccaacaagcaggttcagcagccggtgatggatcgttaccagcagcatggtatgtcgccgctgacgcaagagcagaagccggcagccaaagtggtgaacgacaatacgccgcaaaccgcgaaagagccggattatctggatatcccagccttcctgcgtaagcaagccgattaagaatcgactggaagttgggcatctgcgctctttgtgctaaactggcctcccgatagtggtgtacacttcggttggataggtaaattggcgagattatacgatgatcaaacaaaggactcttaaacgtatcgttcaggcgactggcgtcggtttgcataccggcaagaaagtcacactgacgttacgccctgcgccggcaaataccggggtcatctatcgtcgcaccgacttgaatccaccggtagattttccggctgatgccaaatctgtgcgtgataccatgctctgtacttgcctggttaatgagcatgacgtgcggatttctacggttgaacacctgaacgccgcattggctggcctgggtatcgacaacattattgttgaagtcgatgcgccggaaatcccgattatggacggcagtgcggctccgttcgtttatctgttgctggacgccggcattgatgaactgaactgcgccaagaaatttgtacgtatcaaagagacggttcgcgtcgaagatggcgacaaatgggctgaattcaaaccgtacaatggtttttcgctggacttcaccatcgattttaaccatccagcgattgatgccagcacccagcgctatacgctgaacttctcggccgatgcgttcatgcgtcagattagccgtgcgcgtaccttcggttttatgcgcgatatcgaatatctgcagtcccgcggcctgtgcctgggcggcagcttcgattgtgccatcgttgttgacgattatcgcgtactgaacgaagacggtctgcgctttgaagacgaatttgttcgccacaaaatgctggatgcgatcggtgacctgtttatgtgtggtcacaacattatcggcgcattcacggcgtacaaatcgggtcacgcgttgaacaacaaactgctgcaggcggttctggcaaaacaggaagcctgggagtatgtgaccttcgaagacgacgcaaaactgccaatggcgttccgcgcaccgtcaatggttctggcgtaagcctgaccattcagtaaattcgactggtaacctggtactctctccgaccagggagccagtcgtttttcttttatagcaccctccagttattttcgctgcgatccctggataataattagcgtgcgttcgctgctttattaagcgttttcgccgggcaatcgccttcattcatgctgcctcaggccggtattaatgttagtatttgagcgcaaaattatttctcagggttgctttaccccgtggacatcaggttgtcctgcgaaaaacattaataaagagacagcctgaacgacgacgggtctagcaaagaaaggtaatgaacgtgagtggattgctgacgcgctggcgacagtttggcagacggtatttttggccgcatctcctgttggggatggtcgcggccagcctcggcctgcctgcgctaagcaacggtcacgagaccgcggcgccagcgaaggcgaccgccagcaatcacaatccgagcaaggttaatttctctcagctggcgcttctggagacgaatcgccggcccagctttaccgtcgactactggcatcagcacgccattcgcaccgttattcgtcatctctccttcgccatggcgccgcaggcgctgccggtggcggaagaaacttccccgctgcaggctcagcatctggcgctgctcgacaccctcagcgcgctgctgacgcaggacagcacgccgccggtggtgatccgccaggcgggttacatcccttcttcatattctgccttccgcgtcagcgcctggataagccaggtggcggggatccgcgcagggcctcaacgtctcagctgaaaataaccacggaccatcctattttttgtgactccgcaccgcggggcgtttgagattttattatgcttatcaaaatgttaaccaaggttttcggcagccgtaacgaccgtacgctgcgtcgtatgcgcaaagtcgtcaatatcatcaacggcatggaaccggcgatggaaaagctctctgatgacgagctgaaagcgaaaaccactgaattccgcgcgcgcctggaaaaaggcgaaacgctggaaagcctgatccctgaagctttcgccgtcgttcgcgaagccagtaagcgcgtattcggcatgcgccacttcgacgtccagctgctgggcggtatggtgcttaacgatcgctgcatcgccgagatgcgtaccggtgaaggtaaaaccctgaccgcgaccctgccggcgtacctcaacgcgctaaccggcaaaggcgttcacgtagtgaccgtcaacgactatctggcccagcgtgacgccgaaaataaccgcccgctgtttgaattcctgggcatgacagttggcatcaacatgtccggcctgccggcgccggcgaagcgtgaagcttacgctgccgatatcacctatggcaccaacaacgaatacggcttcgactacctgcgcgacaacatggccttcagcccggaagagcgcgttcagcgtaaactgcactatgcgctggtggatgaggtggactccatcctgatcgatgaggcgcgtacgccgctgatcatttccggcccggcggaagacagctctgaaatgtaccgcaaggtaaacaaaatcatcccgcatctgatccgccaggaaaaagaggattcggacactttcactggcgaaggccacttctcggtggatgaaaaagcgcgtcaggttaacctgaccgaacgtggtctggtgctgattgaagagctgctggtacaggaaggcattatggatgaaggtgagtccctgtactctccaaccaacattatgctgatgcaccacgttaccgccgcgctgcgcgcccatgcgctgttcacccgcgacgttgactacattgtcaaagatggcgaagttatcatcgtcgatgagcacactggccgtacgatgcagggccgccgctggtccgatggtctgcaccaggccgttgaggccaaagagggcgtggagatccaaaacgagaaccagactctggcctctatcaccttccagaactacttccgtctgtacgagaagctggcggggatgaccggtacagccgataccgaagcctttgaattcagctctatctataagctggataccgtggttgtaccgaccaaccgtccgatgatccgtaaagacatggcggatctggtctatatgaccgaagcggaaaaaattcaggcaattatcgaagatatcaaaactcgtaccgctgccggtcagccggtgctggtggggactatctcgatcgaaaaatctgaagtggtttcccgcgaactgactaaagctggcatcaagcacaacgtcctgaacgccaaattccacgccagcgaggcggatatcgtcgcccaggcgggctacccttccgcggtgaccatcgccaccaacatggcgggtcgtggtaccgatattatgctcggcggtagctggcaggcggaagtcgctgcgctggaaaacccaacgccagagcagattgagaaaatcaaagccgactggcaggtacgccacgatgcggtactggccgcaggcggtctgcacatcatcggtaccgagcgtcatgaatctcgccgtatcgataaccagctgcgcggccgtgctggtcgtcagggggatgccggttcttcccgcttctacctgtcaatggaagatgccctgatgcgtatcttcgcctccgatcgcgtgtctggcatgatgcgtaaactgggaatgaaaccaggtgaggcgattgagcacccgtgggtcaccaaggcgatcgccaacgcccagcgtaaagtggaaagccgtaacttcgatatccgtaagcagctgctggaatatgatgatgtggccaacgaccagcgccgggcgatctacacccagcgtaacgagctgctggacgtgtctgacgtcagcgaaaccatcaacagcatccgcgaagacgtctttaaggcgacgatcgatgcccatattccgccgcagtcgctggaggagatgtgggatatcgaaggtctgcaggagcgtctgaaaaacgacttcgatctcgacctgccaatcaaagagtggctggataaagagccggagctgcatgaagagaccctgcgcgaacgtattctgcagagcgcggtagaaacctaccagcgtaaagaagaagtggtcggcgccgagatgatgcgccacttcgagaaaggcgtgatgctgcagactctggattcgctgtggaaagagcacctggcggcgatggattacctgcgccagggtatccacctgcgcggctatgcgcagaaagatccgaagcaggagtacaagcgcgaatcgttctcaatgtttgccgcgatgctggagtcactgaagtatgaagtgatcagcaccctgagcaaagtccaggtgcggatgccggaagaagtcgaggcgatggaacagcagcgtcgtgaagaggccgagcgcctggcgcagatgcagcagctcagccatcagagcgatgatgaagccgcagcccaggatctggcggcgcaaaccggcgaacgtaaagtgggccgtaacgatccgtgcccgtgcggctccggcaaaaagtacaaacagtgccacggccgtctgagctaaggtctgataaaacaaacaaaggcgcagagttctgcgccttttttatggagcgcattcaatgaaaaaactgcaaatcgccgtcgggataattcgcaatccgcaaggcgaaatctttattacccagcgcgccgccgatgcccatatggcgaataagctggagttcccgggcgggaagattgaatctgatgagacgcctgagcaggcgctaatccgcgaactgcaggaggaggttgggattacggtcaccacctcttcgctctttgataagctggagtatcagttccccgatcgccatattacgctgtggtttttcctcgtggaaagttggcaaggcgagccgtggggtaaagaagggcagccgggtcggtggatggcgggaccaacgttggatccggcggcgtttcctccggcgaatgaaccggttatcagcaaacttatcgcccagggctgagccccggggcgcgaggctaacccgccaggcgccgggttagcttgccatcaaatcagggttgctgctcgctccagtcatcgctatcggagagatcccccgcgctggggatgcgcttctcttccgcagcccattctcccagatcgatcagttggcagcgcttgctacagaacggacgaaacggactctgctcgccccacaccacagttttgccgcaggtcgggcagttgacgatagtctcttctgacatgttatctccttaacagcaggccagttcaaaatcaaagcgctccggcacgattccatattcactgtccagcgccaggaaacggatggcgaaacggctcttatggccggaaatttgcggataaagctggtgagccagatcgagacgcaggcggagcagatcggcatcttcgccattatcctgataaaagccgttgaggctggtctgtttgcggaacagcgcggagttgcggataagatcgaggatcaggctcagggactggaccagcggatcgaggctggcaagccagctggccacctgctcgtcgcgatgcgcctgtggcatatggagccagatatgcagggtcggtaaatcgaagctgcagcagccgccaggaatactcaggcgctgacgcaccagcgcaatcaggcgatcttcacgcagaaactgaccaatgcgcggcgcggccatcagggtgctggaggactgcttcaactggtggcgcagctcgttaatgcgctcctgatcgacgcccggcacttctgcccatgactggagcttacgctgctggcgttccagctctttaaccaggtcagtgcgcaactcgccgcgctccaggacatccagcagatcgccggcgttacggaaaaaatggagcgcatcggcatggctggcaatctgcggatggaaagccatctgctggatcagaaattcgatgcgcagccaggtgcgcattttctcattaagaggatgttcaaacagaacgggggtatgcattacgagttttcctgtgaggcggcctgcgatgccagcgttaaatacttttcgtgcaggcgggcaacatccgatgccactgcatccggcgtgccagtgttttcaataacatcgtccgcgacggccaggcgctgctggcgcgtggcctgggcggcaagaatatgttcagcatgttcgcggctgaccttatcgcgcagcatggtgcgttcgatttgcgtctctttcggcacatcgacgaccagtacgcgatcggcctggccggacaggcggttttcgaccagcaaaggtacgacccagaggagataaggggaggtggcggcctgcatctggcggcgcgtttcctgctgaatcagcgggtgcaacagcgcattgagccaggctttttcctccacgtgagcaaaaattttttcccgcagcaggcggcggttcagcgtgccgtcgggggcaatcatctgtggtccaaagtggccgacaatggcctggagcgccggggtaccgggctcgaccacctgacgggcgataacatcggcatcgataaccttaaccccaagctgcgcgaaggcgtcggcgaccgtacttttaccgctgccgatcccgcctgttaacgcgactgtgtaccccatatcttctgaccctgaaacggattgctcgtattttttgcaggcagacagcgatgactggcagcgcgccggggaggcgacagtgagcatgtcgtgaggaccccgcgccaaccgggatcgccgtccgctatactgtttgttttaatcaagcaaatcaaatggttaaaaacaatactccggcaggggaaggcataggcgcctttttctccattcaccaggtaaatttatacgattgtagcgtaaaaaaagtgaaaatcgcagtcttgcgcgggcctgattcgcgcgtatgataacgtcactggagttgtgctctcacattcatgccattaaccccaggaattcgcacatgcgtattgaagaagatctgaagcttggtttcaaagacgttcttatccgcccgaaacgctctaccctcaaaagccgttctgatgttgagctggaacgtgaattcacctttaaacattcaggcctgacctggtccggcgtgccgattattgcggctaacatggataccgtcggcaccttcagcatggctaaagcgctggccacttttggtattctgaccgcggtacataagcactacaccgctgaagaatggctggcgtttacccagggcgcatccgcagacgtactcaagcatgtgatggtttccaccggcacgtccgatgcggatttcgaaaaaacccagcagatcctctctcagaacccacagctgaattttgtgtgtatcgacgtcgccaacggctactccgagcactttgtacagttcgtggcgaaggcgcgcgaagcctggccgcaaaaaactatcatcgccgggaacgtggtcaccggtgaaatgtgcgaagagctgatcctctccggcgccgatatcgtcaaagttggcatcggcccgggatccgtctgcaccacccgcgttaagaccggggtcggctatccgcagctctccgccgtgattgagtgtgccgatgcggcgcacggccttggcggccagatcatcagcgacggcggttgcaccatgccgggcgatgtggcgaaagccttcggcggcggcgctgatttcgtgatgcttggcggcatgctggcgggccatgaagagagcggcggaaccatcgttgaagagaacggagagaaattcatgctgttctacggcatgagctccgagtcggcgatgacccgccatgtgggcggtgtcgcgaaataccgcgcggcggaaggcaaaaccgttaagctgcctttgcgtggaccggtggagaataccgcacgtgatattctcggcggcctgcgttctgcctgcacctacgttggcgcctcgcgtctgaaagagctgaccaagcgtacgacctttatccgcgttcaggaacaagagaaccgggtattcaatagcctgtaatcggctgcactggcgcctgcgcggcgccagtgtttctcatcctcccgccccgccaatggcatcgcccaggtgaaaaacgggcaaatacattgccaccaccagaatcccgaccagcgagccggttatcaccagcatcatgggttcaagatgcgcagccagactatcggctcgctgataggtttgctggcgatggtgatgcgccaggttttccagcatctgatccagcgctcccgcgctttcccccgtgcggatgagctgcaggcacagcggtgtaaaaccgccgcagcggcttaacgcctgccaaatcggctccccctgaacgatcagcgcgcgggcctgcgccagacgctggcgccacagcgggcacgacagggactcttcaacgctttgcagcccctgcagaaagctaataccggcgctttgggttaacgccaggatggtgaagatcaggctcagctgttgtccgccgatcagggagccaatgagagggagcgcgttaagcaaccgctggcggcgcagcaaccagtcgctgcgccgccggatcagctggttgagcagcagcgggctcagcagcgaggccagcagcagcggccagccgcgacttagcatgtcgcctgccgcaacgaccatccgcgtcaatagcggtagcggcgtactgaacgtctggtagatggcggtgaactcgggcaggacaaaatagagcatccccagcaccaccaacagcgccagagagagcacgatcagcgggtagcgcagcgcttttttgactttgctggcgagccgctgctgctcctgctgctgattcgccaactgcaggcagcagatatcgagcttgcccgtcagttcgccggtgctaatcatcgccagatataggggcggaaaagcctggggccactgcgccagcgcggcagagaacgccacgccctgggccagctcgcggcctagcgcctcaagcagcgcctgccactgggcatgcgactgctgctgcgccagcagcgataacccttccgccagcggcaggccggcctgcagcagggtcgccagctggcggatcgtttcgcaactgtagcgcgggtgccagaggctctgcttcaccgcacagcggcgtacagccagcggtataactcgctgctgttggaggtgctgcaggacctccagacgcttggtttgccatagcatcccctgacaaggggcgccctgcacatcgataccgcgccagcgccagagacgcttagtcgccatgggggatccccagcacccgcaccacctcttcgaggctggtcaatccctgttcgatagcctgacagccgctttcaaaaagcgtcatcatccctgcggctcgcgccagagattcaatctcaatggcgttaagtccctggactatcccctggcgtagcccgggggtaacaggcagcacttcgaacagcgccagccggccgtaatatccgtggtaacaatgttcgcagcccgctgcctgccagcgtggcagcgggcggggccacaggctgtgcggcaggtcggcggcgctgccggcattacgccgacagtggggacacagcttgcggaccagacgctgggcgatgaccagcgagagcgcagaggaaatcatccagcgggcgatgcccatttgctgcaggcgggtcagggtttcgctggtggaattggtgtgcagggtggagagcaccagatgaccggtctgggcggctttgagcgcgatttcagcggtctcggcatcgcggatctcgcccaccatgacaatatccggatcctggcgtaacagggcgcgcagcacactgtgaaaagtgagtccggcgcggggattgatttgcgtctggttcatcccggcgatggggatctccagtggatcctccacgctacagatattcacttgctcacggtttctggcctgcagggcgctgtagagggtcaccgttttcccgcttccggttgggccggtgaccagcagcagaccctgcggctggttcagcgcctggcgaaaggccgccagctgggaggatgagagtccgagtgcttccagatccagcgcctggtcaacctgatgcagaaggcgcaggacaatcttttcgccatagcggcagggcagagtggcgatgcgaaaagagagcggtcgtcccgcaagattcagcgcgaactggccatcctgcggtaaacggtgctcggcgatatcgagactggccaggaccttgagtcgcgcgataaccggtgcggccagttcgggagccagcaacggtagggcgtgaaggacgccatcgacccgcaggcggatgcgtaagtgcgtttccgtgggctcgatatgaatatcagacgcccgctgacgcagggcctgttcgaggatctggttgacccgttcggcgatattttccggcccgtcgttctgcgccagttgcgcctgcttttcctgggcctgcagacgcttatccatctgctcctggctccagcattcaatgtcgatccgcttttgcgtcgcgaagcgtagcgcctccatcaactccgccggcggggtattaaccaccgcaatagagattgtctgttcatcgctatgcagcagcatggcgtggtagcgacggcagagggggatcagctgttctgttttcatgcattagccctcacttcacccggaaaacgtcttcgcaggcctgctgaagcgcgctattgccggtgatggtgcagacgcgctgccagccggtgacgccctcggcattgtcccaggtcggcgtcagggtgacccccagtccgttcagactctcctgaccggtgagggtgacgacccctttggccacgctcatggcggagaggtagcgcgtggttgtcggcgagggaatgccgttgctgccgccgtcgcatggcgttaggccgccatgatcgagcgcgcaaagttcgatggctgtccggtaagggacaaaggtctgcagcaggtcggtgagggcggctttacgcaggtagttctggtaggccgggatgccgatggcgctaagaatggcgatgattccgataaccaccatcagttcaatcagggtaaaacctcgttgtttatccataagtcgctccttgttgtgacaggagcactgtgaagggattgaggggcgcaggcgagggggcgaaaacgatccgggaaagcgggttccagggtttttatctggatttcatggtgagcacgggcgactgcgaggcgggccgcaaattcaggccttcacgcccggaagcgtgaaggcctgttgctcagcggaagcgcatcgacaggtcgagcgcctgcacatgtttggtcagggcgccgacggaaatatagtcgacgccggtatcggcgaattcgcggatggtgtcaaaggtaacgttgccggagacctccagcgccgcctggcctgcggtaattttcaccgcctcgcgcatcagatcggtggtgaagttatcgagcataatgatatcagccccggcttttaacgcctgctccagttcatccagggtttccacttccacttccaccggcacatcaggatgcagccagaacgccttttccactgcctgacggatcgatccggaggcgataatgtggttttctttaatcaggaacgcgtcgaacaggcccagtcgatggttggcgccgccgccgcagagtaccgcgtatttcagcgcggtacgcagccctggcagcgttttgcgcgtatccagcagttgggttttggtgccggcgagcaggtcgacatagcgacggacgacgctggcgacgccggagagggtttgcacaaagttcagcgccgtgcgttcgccggtgagcagaatacgcgacgggccttccaattcgaacagcggctggtcggctttgaccgcatcgccgtcggccacgtgccaggtgatattcacgtcgtcaccggcgagctgaataaagacctcttccacccagcgtttgccacagaagacgccatcttcacgagtaatgaccaccgcatgggagcgtgcatcctgcggcaataattgcgcgctaatatcgttgttggcgtcgacttcgccgcccagatcttcccgcagggagtgtgcgacagcatcggtaatatcgagattaatacgttccagcagcacgtcacggcggcggtcggggttgtaacgacgaggcgacatgataaagctccagatagataagattcagaagtgggaaacatgctaacctgaacgacgtttcagtaccatacacacttcatcctttgggccggcgtgtggcccggaagcatgagttcgcgaaaggagatcccgcatgcagttgaacgaggggtggttggtcggcgcgcgtcgggttccctcgccgcaccatgactgccgtccggatgaagagaccccttccttactggtggtgcataacattagcctgccaccgggggaatttggtggtccgtggattgatgcgctgttcactggtaccctggatccgcacgcgcatcctttctttgccgagattgctcatctgcgcgtttcggcgcattgtctgattcgccgtgatggcgaaatcgtgcagtatgtgcctttcgataagcgggcgtggcatgcgggcgtctcctgttatcagggacgcgaacgctgcaatgacttttccatcggcatagagctggaaggcaccgatactctggcgtataccgacgcgcagtaccggcagctggcggcggtgacggatctgctgatcgcgctttatccggctatcgccgaaaacattgcgggccacagcgatatcgcgcccgtgcggaaaaccgatccaggaccggcctttgactggataaaataccgtgcgctgctcagcgccccgtcagaaaaggagacctcatgacgctgtttacgacgctgttggtgcttatcgccgaacggctgtttaagctgggcgaacactggcagcttgatcatcggctggaggtggcgtttcgccggataaaacatttctcgttaccgggcacgctactgatgacgctggtggctgtcgcggtcgtgtatatcattcagcgtctgctgcaggggcagctgtttaacataccgctgctggtgttctggattttactgggcctgctatgcattggcgccggcaaagttcggctgcactaccatgcctatctgaaagcggcgtcgcgcaatgacagtcgcgcctgcgatgccatggccagcgagctgacgcttattcacggcgtgccgccgggctgtgatgagcgtgagtaccttagcgaactgcaaaatgcgctgctgtggattaactatcgatactatctggcgccgcttttctggtttgtcgtggggggcgcctggggcccgctgacgcttatcgcctacagcgtactgcgcgcctggcagacatggctggcgcgctaccagacgccgcaccaccggttgcagtccgggatcgatggtatcctgcatattgtggactggctgccggtgcgtctggtgggggtggtctatgccctggtgggccatggtgaaaaagcgctcccggcgtggtttgcttcgctgggcgaccgccattcgtcgcagtatcaggtgttgacccgcctggcgcagtattccctggcccgtgagccgcacgtggataaagtagcgacgccgaaggctgcggtatcgatggctaagaagacttcgctggtggtagtggtgattatggcgctgctgacgatttacggtaccctggtttaacggcctgagcccgcgcgctgcctgccacgatgtacgtacctgcggggcttttgttgcctgatggcgctgcgcttatccggcctggcgagtcacccgcaggctcacgtcacgtaggcccggcaagcaacagcgccgccgggcgatatatcagacgccgtgctggtcatgttgccgggtggcggcttcgcctgacccggcctggagaacccgcgccagcgggtaacattccgaaccgctacagcgtatccgccggtggaataccgaagtcgggcatcccgtcttcccgccagctgaccagctttaaccgcgtatggcgattgggatcatacagcgggtcgccttctatctcagtgtaattccgcgcgtgatacaccagcacatcttccccttccggcgtttgggtaaaactattatgacctgggccatactggcggttttcatagctggtgcggaacaccggctgcggagctttatgccagtttgccggctgcagcggatcggcctgccggtcgatccataacaaccccatgcagtagttttcatcggtggcgctggcggaatagctgataaatagcttatcgccatgcatcagtaccgcaggcccttcgttgaccttaaatccccggcactcccagtcgaactccggcttgctcagcatgaccggctcgccttttaacgtccacgggttagccatttcggcgagatacaagtttgagttgccttcgatatgcggggatttttgcgcccacagataccagcgtttcccctgatgggtaaaagtggtggcatcgagggcgaaggtatcgaaaggcgtgaccacctggcctttttcctgccagcggccggtcagcggatcgctgtcagcgcactcgagaacgaacatgcgatgctggaacatccccagcgcatccagatcgtgagtatgggtggcggcaaaatagatataccatttaccgtctatttcatgcagctccggcgcccaaatcagctggctcatcggcccgctttgcggcgcgcgccaaaccacgaccggctcagcatcgcgtaatccttcaagggttaccgcgcgccggatctccagccggtcgtattccggcaccgaggcaataaagtagtagtggctaagatggcgcaggataaaggggtctgcacgctgttcaataaaggggtttggccagttgttcatcaggctttccttacgtgttcactggttttcagttcctggtattcgttcagctcgctgtagttgctgcggcgcttctccagatcgctctgaatctggcgcatcagggtacggtcaaccttcagcagacgcaccacgccggcggtgatcagatagccgacgccgggaatgactgagaatagcagcacgataccgttcagcgcggaggcgctttgcgctttcgcgccggcgtcgtagccgtaccatgacagcaggaaaccgaccattgccccggcgaccgccaggccgaccttcaggaagaacagattaccggagaagctgataccggtgatgcgcttgccggttttccattcgccgtagtcgtcaacgtcggacattagcgaccagtgtagcggggaagggatttgatgcagaatgttgagcaggaagtagagcaccataatcagcgtggtggcgtgtggattaaagaaatagaaggcgcaggagaacacggccagcacgatattggtccagaagaaaacctgcagtttgcaccagcggtcggtcaggactttcgccagcatgctgccaatcatcatcccaactacgccgaggctgataaacagggtggcaaaatgggtgctttgtcccatcacccaggtgacgtagtacatggtggcggccatgcggataaagcccggacagacgttgcacagcgtgagcagcaggatgcgcacccactggtcatttttccagacgtctttcagatcttttttcagttcgtcattcgtctgcaccgccgggcggatacgttcgcgcacggtggcgaagcagaacaggaacatacacataccgataaaggccagcacggtcatcgccatctggtagcccttcgctttatcggcgccgccgaaccagtcggccattggcagcagcgtcaatgacagcaggagcgtggcgatacccaccatgacgaaacgataagactggcaggcaacacgctctttcggatcggcggtcatcaccgttcccagcgagcagtagggaatattaatcgcggtataggtaatcgacagcagaaagtaggtcacaaacgcatagatgactttgctattgtaggtccactcaggagtggtgaacatcaggacgctgaacagggcgtaggggaaggcgatccacagcagccatggacgaaagcgaccatatttactacgggtgcggtcggcaagagcgcccatgatagggtcggttaccgcatcgatgactcgcaccgagagcagaagtacgccgaccagcgccggcgccagtccgaatatatcagtgtaaaaatagttcacaaacagcatgatggcgccaaagataatattgcatccggcatcacccatcccgtaaccaatcttttctcttattgaaagcgtgttctctgccatgtgcggtctctccgttgcagtatggagagaattattggctgcggttggcagaaatacgttgcaggaactcgttgacgatatggataaataagctatggaggggaaagtgtgaagcagataacaatgctctgcgcccattattcaggggagggcgcagagcaaagtgaagtattgatgagatgtattattgtgcttttatggtggcggcggctttctctttaaacaggtagcccacgcccagcaccgcaatccataccgggatcagccagacggaaatcgccatccccggggtcatcagcataatcaccagcaccgccgccataaacagcaggcacagccagttgcccagcggatagaagagggccgggaaacgcgtgaccacgccctgctgctttttggcgcgacggaatttcatatgcgcgaggctgatcatcgcccagttgatgaccagggccgagaccaccagcgccatcagcagaccgaaagcagattcaggcgccaggtagttgatcagcacgcacagcgcagtgaccagggccgagacgagaatggtattcaccggcacgccgcgtttgtcgacgctgagcagcgcttttggcgcgttgccctgctgagcaaggccgaacagcatacggctgttgcagtagacgcagctgttataaaccgacagcgctgccgtcagcaccaccacgttcagagcgtttgccaccagcgtatcgccaagttcatggaagatcaggacgaacggactggtgtccgcggtgacgcgggtccacggcagcagggagagcagcaccgccagcgaaccaacatagaagatcagaatacggtaaataacctgattggtggctttaggaatgctttgctccggattatccgcttccgcggcggtgatccccaccagctccaggccgccaaaggagaacatgatgatcgccatcatcatcaccagcccgtaaaagccgtgcggcaggaagcccccctggtcccacaggttacgtaccgtcgcctgcgggccgccgttgccgctgaacagcagccagccgccgaacaaaatcatcgccactacggcgaccactttgataatcgcgaaccagaattccatttcaccgaacactttgacattggtcaggttaatggcgttgatggcgatgaagaagaccgccgccgaggcccaggtagggatttccggccaccagaactggatatatttgccaacggcggtcagttccgccatggccaccaggacatacagtacccagtagttccagccggaggcgaagccggcaaaaccgccccagtatttgtaagcaaagtggctaaatgagccggccaccggctcttccaccaccatttcgcccagctgacgcatgatcaggaaagcgataaaaccggcgatagcgtaaccaagaatgatacccgggccggcggactgaatgacggacgcgctccccagaaacaggccggtgccgatagccccgcccagcgcgatgagctgaatgtgacggtttttcaggccgcgcttcagccgatcgccgtgctgttgaccttccatatgaaacctcgtgtgtggttattttttgtgtacgtcatccgtcaggttgctgcttcactgctgtccctgcctgaaagcatagccagcgaaaatttgggcgaagtggcccactttttacctgagtgatggcgcgcacatattgttgtgtttgtgtattcaggaacttccgtttctgtattgttttgtttacggaaggctgtgtggtaattccgaaaaaggcctttcgtctccggcagaatagtggtaagcgcgtttgaatgcacctgctttatgaagggatgatgacgatgtgtctaaaaagacatcaatagtcacaatctgtcgtattttgatgcatgctgctttgtcattatttattcactgtaaatgactctgtattcatttattgcagcgttgaatcggttcagaaagcgtaatttttcgtttctataaagttaaggctacctctttgtgagtaaacgtaacatttgtgcaaggttacatttctgaaatgttatttctgtaaggttgttaaaatgtcccgggtttactgatttcaatcaaaacctgtatggacagaaggtgaatactttgttactttagcgctacgaactttaaattggtaagaccaattgactccgggctaatggcagagacagggaatatggcctacagcaaaatccgccaaccaaaattatccgatgtgatagagcagcagctggagtttctgattcttgaggggaccttgcgccccggtgaaaaactcccgccagaacgagaactggctaaacagttcgacgtttcccgcccctcgctgcgtgaggcgattcaacgcctcgaagccaagggcttgttgcttcgtcgtcagggaggtggaacgtttgttcagagccgcctgtggcagagcttcagcgatccgctggttgagctgctgtccgatcaccctgaatcccaattcgatctgcttgagacccgtcacgcgctggaaggcatcgcggcctattacgcggcgctgcgcagcaatgatgaggatcgcgaccgtatccgtgagctgcatcaggctattgaacgcgctcagcagtcgggcgatttggacgctgagtccggcgccgtcgtccagtatcaaatcgccgtcaccgaggcggcacacaatgtggtgttgcttcatctgctaaggtgtatggagccgatgttggcgcaaaacgtgcgtcagaactttgaattgctgtatgcccggcgggaaatgctcccgttggtcagcaaccatcgcactcgcattttcgaggcgataatggccggggagccggagcaggcgcgtgaagcgtcgcaccgtcacctggcgttcattgaggaaattttgctggatcgtagtcgtgagcagagccgtcgagagcgctcactgcgtcgtttacagcaacgaaaggacgagaactccggttcttaagcgccatttttagagcgcggcaactaaacgcagaacctgtcttattgaatttttggttgttccagcgtgaagaacgaagagttcaatgggacaggttccagattaatcaacgattagatagataaggaatacccccatgtcagaacgtttacacaatgacgtggatccgatcgaaactcgcgactggctacaggcgatcgaatcggtcatccgtgaagaaggtgttgagcgcgctcagtatctgattgaccaactcctttctgaagcccgtaaaggcggagtgaaggttgctgcaggcgcttccgccggcaactacgtcaacactattgccgttgaagatgagccggaatacccgggcaatctggatctggaacgtcgcattcgttctgcgattcgctggaacgccatcatgaccgttctgcgcgcgtcgaaaaaagatctcgaactgggcggccacatggcgtcctatcagtcttccgcgaccttctacgaagtctgcttcaaccacttcttccgtgcgcgcactgagaaagatggcggcgatctggtgtacttccagggtcacatctctccgggcgtatatgcacgtgcgttcctggaaggccgtctgaccgaagagcagatggacaacttccgccaggaagttcacggcaagggtctgtcctcttatccgcacccgaaactgatgccggaattctggcagttcccgaccgtatccatgggtctggggccgttgggcgctatctatcaggccaaattcctgaaatatctggaacaccgcggtctgaaagacacctccgaacaaaccgtttacgccttcctgggcgacggcgagatggatgagccggaatcaaaaggcgctatcaccatcgccacccgtgaaaaactggacaacctggtcttcgtcatcaactgcaacctgcagcgtctggacggcccggtcaccggtaacggcaaaatcattaacgaactggaaggcatcttcggtggtgctggctggaacgttatcaaggttatctggggcggccgttgggatgagctgctgcgtaaagacaccagcggtaagctgattcagctgatgaacgaaaccgttgacggcgactaccagaccttcaaatccaaagacggcgcttacgttcgtgagcacttcttcggcaaatatccggaaaccgctgccctggtcgctgactggactgacgagcagatctgggctctgaaccgcggtggtcacgatccgaagaaagtctacgctgcattgaagaaagcgcaggagaccaaaggtcagccgaccgtgatcctggcgcataccattaaaggttatggtatgggcgataccgctgaaggtaagaacatcgcgcaccaggttaagaaaatgaacatggacggtgttcgctacgtccgcgatcgtttcaatgtgccggtggcggatgccgatctcgaaaaactgccgtacgtaaccttcccggaaggttccgaagagcacacttacctgcacgctcagcgtcagaagctgaacggctatctgccgactcgtcagccgaagttcactgagaaactcgagctgccgaccctggccgacttcagcgcgctgctggaagagcaaaacaaagaaatctctaccactatcgctttcgttcgcgccctgaacgtgatgctgaagaacaagtcgatcaaagatcgtctggtgccgatcatcgccgacgaagcgcgtaccttcggtatggaaggtctgttccgtcagatcggtatttacagcccgaacggccagcagtataccccgcaggaccgtgagcaggttgcttactacaaagaagacgagaaaggccagattctgcaggaagggatcaacgagctgggcgcaggcgcatcctggctggctgctgcgacctcttacagcaccaacaacctgccgatgatcccgttctacatctactactcgatgttcggcttccagcgtatcggcgatctgtgctgggcggctggcgatcagcaggctcgcggcttcctgattggcgggacttccggtcgtactaccctgaacggcgaaggtctgcagcacgaagatggtcacagccacattcagtcgctgactatcccgaactgtatctcttacgacccggcgtacgcctatgaagtggctgtcatcatgcatgatggtctggtccgtatgtacggcgaagcgcaagagaacgtttactactacatcactacgctgaacgaaaactaccacatgccggccatgccggaaggcgccgaggaaggtattcgtaaaggtatctacaaactcgaaaccatcgaaggtagcaaaggtaaagttcagctgctgggctccggttctatcctgcgtcacgtgcgtgaagcagcgcagatcctggcgaaagactacggcgtgggttccgacgtgtatagcgttacctccttcaccgaactggcgcgtgatggccaggattgcgaacgctggaacatgctgcacccgctggaaaccccgcgcgtgccgtatatcgctcaggtaatgaacgacgctccggcagtggcatccactgactatatgaaactgttcgctgagcaggttcgtacttacgtaccggctgatgattaccgcgtactgggtaccgatggcttcggtcgttccgacagccgtgaaaacctgcgtcaccacttcgaagtcgatgcttcctatgtggtcgtagcagcgctgggcgaactggctaaacgtggtgaaatcgataagaaagtggtggctgacgctatcgcgaaattcgacatcgatgcagaaaaagttaacccgcgtctggcgtaagaggtaaaagaataatggctatcgaaatcaaagtaccggacatcggggctgatgaagttgaaatcaccgagatcctggtcaaagttggcgacaaagtagaagctgaacagtcgctgatcaccgtagaaggcgacaaagcctctatggaagtcccgtctccgcaggctggcgtcgtgaaagagattaaagtctccgtcggcgacaaaaccgagactggcaaactgattatgattttcgattccgccgaaggtgcagccgccgctgcacctgcgcaggaagagaagaaagaagccgctccggccgccgctgctccagcggctgccgcggcagcgaaagaagttcacgtcccggatatcggcggcgatgaagtcgaagtcactgagatcatggttaaagtgggcgacaccatcgccgctgagcaatccctgatcaccgtagaaggcgataaagcctctatggaagttccggcgccgttcgccggtaccgtcaaagagatcaaaatcaataccggcgataaagtttccaccggctccctgattatgatcttcgaagtggcgggcgctgcgccagcagccgctcaggcacaggctgccgcgccggctgctgcggctccggctgccgcagcaggcgtgaaagatgttaacgtcccggacatcggcggcgacgaagttgaagtcaccgaagtgatggttaaagtcggcgataaagtcgcggcggaacagtccctgatcaccgtagagggcgacaaagcctctatggaagttccggcgccgttcgcgggtaccgttaaagagatcaaaatcagcaccggcgataaagtcaaaaccggttccctgatcatggtcttcgaagtggaaggcgctgcgcctgccgccgctccggctcaggctgctgccccggcaccagctgctgccccggctcaggccgctaagcctgccgctgcgccggctgcgaaagcagaaggtaaaagcgaattcgctgaaaacgatgcctacgttcacgcgaccccgctgattcgccgcctggcgcgcgagttcggtgttaacctggcgaaagtgaaaggcaccggccgtaaaggtcgtatcctgcgcgaagacgttcaggcttacgtgaaagacgcggttaaacgcgctgaatccgcacctgcggctgccgctggcggcggtatcccgggcatgctgccgtggccgaaggttgacttcagcaagtttggcgaagtcgaagaagtggagctgggtcgtatccagaaaatctctggcgccaacctgagccgtaactgggtgatgatcccgcacgttacccacttcgacaaaaccgatatcaccgatctggaagcgttccgcaagcagcagaatgccgaagctgagaagcgtaaactggacgtgaaattcactccagtggtcttcatcatgaaagcggttgccgctgcgcttgagcagatgccgcgcttcaacagctcgctctccgaagatggtcagcgcctgacgctgaagaaatacatcaacatcggtgtggcggtggataccccgaacggtctggtggttccggtcttcaaagacgtgaacaagaagagcatcaccgagctgtctcgtgaattgaccaccatctcgaagaaagcgcgcgatggcaaactgacggctggcgaaatgcagggcggttgcttcaccatctccagcatcggcggcctgggtaccacccacttcgcgccgattgttaacgcgccggaagtggccatcctcggcgtgtctaagtccgcgatggagccggtatggaatggtaaagagtttgtgccgcgcctgatgctgccaatctctctgtccttcgaccaccgcgtcatcgacggtgctgatggtgcccgcttcattaccatcattaacaacaccctgagcgacattcgccgcctggtgatgtaatcgaaaaagccggcctgacggccggcttttttctgataacctcaggctgttggggattatcagcaacaaaggacaaaatcgtttgccgtttgttgtttaaaaattgttaacaattttgtaaaatacacgcggatagaacgtcccggtggacttgggcgtaagaataatagcgtcagacccgccggatataaattacagaggtcatgatgagtactgaaatcaaaactcaggtcgtggtacttggggcaggccccgcaggttactctgcagccttccgttgcgctgatttaggtctggaaaccgtcatcgtagaacgttacagcaccctcggtggtgtttgtctgaacgtgggttgtatcccttctaaagcgctgctgcacgtggcaaaagttatcgaagaagcgaaagcgctggccgaacacggcatcgttttcggcgaaccgaaaactgacattgacaagatccgcacctggaaagaaaaagtcatcactcagctgaccggtggtctggctggcatggccaaaggtcgtaaagtgaaggtggttaacggtctgggtaaatttaccggcgctaacaccctggaagtggaaggcgaaaacggcaaaaccgtgatcaacttcgacaacgctatcatcgcggcgggttcccgtccgattcagctgccgtttatcccgcatgaagatccgcgcgtatgggactccaccgacgctctggaactgaaatctgtaccgaaacgcatgctggtgatgggcggcggtatcatcggtctggaaatgggtaccgtataccatgcgctgggttcagagattgacgtggtggaaatgttcgaccaggttatcccggctgccgacaaagacgtggtgaaagtcttcaccaaacgcatcagcaagaaatttaacctgatgctggaaaccaaagtgactgccgttgaagcgaaagaagacggtatttacgtttccatggaaggtaaaaaagcaccggcggaagcgcagcgttacgacgcagtgctggtcgctatcggccgcgtaccgaacggtaaaaacctcgatgcaggtaaagctggcgtggaagttgacgatcgcggcttcatccgcgttgacaaacaaatgcgcaccaacgtgccgcacatctttgctatcggcgatatcgtcggtcagccgatgctggcgcacaaaggtgtccatgaaggccacgttgccgcagaagttatctccggtctgaaacactacttcgatccgaaagtgatcccatccatcgcctacactgaaccagaagtggcatgggtcggtctgaccgagaaagaagcgaaagagaaaggcatcagctacgaaaccgccaccttcccgtgggctgcttccggccgtgctatcgcttctgactgcgcagatggtatgaccaaactgatcttcgacaaagagacccaccgtgttatcggcggcgcgattgtcggcaccaacggcggcgagctgctgggtgagatcggcctggctatcgagatgggctgtgacgctgaagacatcgccctgaccatccacgctcacccgactctgcacgagtccgttggcctggcggcggaagtgttcgaaggcagcatcaccgacctgccaaacgccaaagcgaagaaaaagtaactttttctttcaggaaaaaagcaaaagcggctccgggagccgctttttttatgcctgatgtttagaactatgtcactgttcataaaccgctacacctcatacatactttgaaaatagtaactcagtaaacttataggtagttaatgatatcgatgaggtgtgagatgaaacgctttttaaccacagcgctggtcgctgcaacgttttttaccggtgtggcttacgccgctgacgccaacattccctgggcggacaacagcggcggtacggaaacgacccacattgcggcgatgggccaggatctgaatgcccagcatcagcaggtgacgaagaccaatgaaggggtatgggcggcgaattccggtagcatcagcgctgacgaagcggcattatccagcacaaaaccagcctttgccggcgatccttctctgatgcctcaccagggctaagtgaatgaaaacgcccggttgcgtgagtgcaaccgggcgttttttttaaggttctgccacctgccagccggcgtcagcgtcgggggtaaagcgcgttatctcctgtgcctttgcggcgctctcttcaccgagattggcctgatagaccctatcctgttgatcgatcataaagctcatcacaccggtttcaccccaggctatcggccaggccagcaaggcgacgctctggtcatcgcgaccggcgataattcgaaagcgatagccatggtagccgctaccgggcaccgtcgggctaaaggccggaccgagcgggcttggcgcttcgcccggcgaagttggccagtacaagccatcttttttgccttcgctactgatgattttctgcgcccagcggtggttcagatgataatagtcctgctgggcatcaacataggcatgcatggcggcgatcgccgaaagctcattgcggccgatggcgcgggtgaggatctcctcttcgccagcggccatatcaaagcgccatccctcagacgcttttacgataggcacgggcagacgccatgcctcgctaccgacatcgagccaggctttgtcaccctgctggatgatgacatgtttcacctgccagtcgcgttgaaagcgatcgacggcggcagggtcgatcccgtccgtgggtaaaaactgctgccagttatcgccgagtacttcgctcagcgcggcttcattaggctggctgatcgcttcggccagcgcagttgcggcctgttccggcgtggcaaactgctgttgggcgaaggcggcaagcggcgacagcattaacgtaaacagggcaacggataatgggtatctcattctgctcatccttagcggcgacgcagttcatggtgttcggaaagacgttctctggcgccctcgcgtaactcgcggtttacgccggataactggcggctctgcagtcctcgttcctgctgcgcttgccaggagggggcgcggctttcgttgccgctaagggcgttggcgcgcagatggctgagcgtctgctgacgctgggctggcgtggcggactggaactgctgccggcgctgctgctgctgaggtgtgcggttctgctcgtggctcctggcggcttctcgacgctgctgttgggtcggcgtactgtcgtaaccgcggtaattactgcgttgggtggcttgcttcagctgcgccgaggccgcctgacgctgggcgtcgcgtgaggcgttgtttgccgccagattgcccgctgtggccgtcggtacgttatgctgcagctgggtcatcgctgcctggcgctgcgcttcgcgatcgactggcgcatgttgggtcgcgctcagtccgccggaaacgttggtctgatggaagcgctgagctaccgtattatcgggatacggtgtgtgtccgcgataggcaggattgtgctgccagttaacgtggtttcccggcaggttttctcctgttatatgattgaaattatttacattaatattgatgttatcgccattatgcgagtaatcgccgtggtggtagtcgtcatcgtgatggtgatggtcatcatcatcccagtcgatactgctgaacagcgcccaggtggtggccacgccgaggctgtacccgaagcctttgacgaagctatcggtaaactgctccccgggagggggtggcagatagaccggcggataggcgctgttcggccaggtaccatagacggtggaggggttatagctgggaacatagaccacctgtggattggtcggctctattttaatgacctgcgtgggcgcaggcgccgctgtgtgggcggttgcggttgctgtcgtgctgctgctggccgaaaccggtgcggcaggggtgacaatcactttctgctgcggtgtggatttcagcgtcccggtctgttgggcaatggcgcgcagacgctgcactgaatccatcacatcatgcggctgggccaaaaacgcattgccaagattttccacccagggcggattctcgcccatcatcgccagcagggcagggaaagcgacaagagatttgacgctagggtcccacggctggctggcaaccgcctgcacggccgcatcccctttcatcgcggggttatcctgggaccactggaccgcctgcaggacgttgtcgggataagtggaggccatcaacacctgcgacagcagactgtccgggtagagcgcgataggggcgacccactgatcaatttgcgcctgggtgtaagtggcggccaccggctgtgtcgtcgacgctgcgggcgctggcgcttgctgcgcaggcggttcagcgatcgtcgctggggttcggctttgcacatagagtgttcctgccgccgcgagtaagccagcgctacagagcagggcgataatatggggtttgaacggcagtgacatggaaactcctgacccaaaaagtaacccatctcgctaaagtatctgcgaaaacggcgcgtttgctgagtataagtaagcggtatggctttttattgattattgttgggatcggcccgtggcgttgtacgcggaaaggaatttttgtcgtgggatttgaacagaaagcctgcaatatcctgcccttaacgattcagctaaattttaatgttgcttttttgtaaacagattaacacctttcaaaaatcctgctatgctgccgacgcggtatcgggcatttaccctacaaactgctgtctcacaggagcgtgaagaaaatcgcccagccactaaatccttcaagatgcgtcacgcggcaagctaagccaggacagaggcagattgattgaagacgtgtaggccgcattatgacaatgagagcgaggagaaccgtcgtgctagaagaataccgtaagcacgtagctgagcgtgccgccatggggattgttgccaaacccttagatgcaacccaaatggccgcgctggtagaactgctgaaaaacccgcctgcgggcgaagaagaattcctgttagacctgctgattaaccgtgtaccgccgggcgtcgatgaagccgcctatgttaaagctggattccttgccgcgatcgccaaaggcgaagcgacctcccccctggttacccctgaaaaagccgttgaactgctgggcaccatgcagggcggttacaatatccatccgctgatcgatgcgctggacgacgcgaaactggcgccgattgccgcgaaagcgctctcccataccctgctaatgttcgataacttctacgacgtggaagagaaagccaaagcgggtaacgagcatgctaaacaggttatgcaatcctgggctgacgccgaatggttcctgaaccgtccgcagctggcagagaaaatcactgttaccgtcttcaaggtcaccggcgaaacgaacaccgatgatctctctccggcgccggatgcgtggtcgcgcccggatatcccactgcatgcgctggcaatgctcaaaaaccccgcgaaggcattgagccggatcagccgggcgtggttggcccaatcaaacagatcgaagccctgcagcagaaaggctacccgctagcctacgtcggcgacgtggtcgggaccggttcttcacgtaaatccgccaccaactcggtgctgtggtttatgggcgacgatatcccgaacgtgccgaacaagcgcggtggcggcctgtgtctgggcggtaaaatcgcgccaattttcttcaacaccatggaagatgcgggcgcgctgcctatcgaagttgatgtatctaacctgaacatgggcgacgtaatcgacgtttacccgttcaaaggcgaagtgcgtaaccacgagaccaacgaactgctggccagcttcgagctgaaaaccgatgtgctgatcgacgaagtgcgcgccggcggccgtattccgctgatcatcggtcgcggtctgaccaccaaagcgcgtgaagcgctgggcctgccgcacagcgatgtcttccgtcaggcgaaagacgtggcggaaagcacccgcggcttctcgctggcgcagaaaatggttggccgcgcctgcggcgttgccggtatccgtccgggcgcttattgcgaaccgaaaatgacctccgtcggttctcaggacaccaccggtccaatgacccgtgatgagctgaaagacctggcgtgcctgggcttctctgcagacctggtgatgcagtccttctgccacaccgcggcctacccgaagccggttgacgttaccacgcaccacactctgccggacttcatcatgaaccgcggcggtgtttctctgcgtccgggcgatggcgtgattcactcctggctgaaccgcatgctgctgccggataccgtgggtaccggcggtgactcccacacccgtttcccaatcggcatctccttcccggcgggctctggtctggtggccttcgccgccgcgaccggcgtgatgccgctggatatgccggaatcggtgctggtgcgtttcaaaggtaaaatgcagccggggatcaccctgcgtgacctggtccacgccatcccgctgtacgccatcaagcagggcctgctgaccgtggagaagaaaggtaagaaaaacatcttctctggtcgcatcctcgagatcgaaggtctgccggatctgaaagtcgagcaggcgttcgagttgaccgatgcctcggctgagcgttctgccgccggctgcaccatcaaactgaataaagagccgatcgttgagtatctgaactccaacatcgttctgctgaagtggatgatcgccgaaggctacggcgaccgccgtaccctggagcgtcgtatccagggcatggaaaaatggctggcggatccgcagctgctggaagccgatgctgacgcggaatacgcggcagtgatcgacatcgatctggcggatattaaagagccgattctgtgcgcgccgaacgatccggacgatgcccgcctgctgtctgatgtgcagggcgagaagatcgacgaagtgttcatcggctcctgcatgaccaacatcggccacttccgtgccgccggtaagctgctggacagccacaaaggccaactgccgactcgcctgtgggtggcgccgccaacccgtatggatgccgcgcagctgaccgaagaaggctactatagcgtgtttggtaagagcggggcgcgtatcgaaatccctggctgttctctgtgtatgggtaaccaggcgcgcgtggccgacggcgcgacggtggtttccacctctacccgtaacttcccgaaccgtttaggtaccggcgctaacgtctatctggcctctgccgaactggcagcggtggcttcgctgctcggcaaactgccgacgccggaagagtaccagaccttcgtggcgcaggtggataagacggcggaagatacctaccgttatctgaacttcaaccagctggatcagtacactgaaaaagctgacggcgtgatcttccagaccgcggtgtaaaccattcggtcagcccggctgaccgtttggcgataaactctccaatgcccggtgaacattgcatcaccgggcatttttatttccaaacctcccgcccgctacgctttttttctttctgtctgctgcgataattactgcatgggtacagtgcagcggtgacgcattgcccttgcagaggaaaagactatggattacgaatttctgcgcgatattaccggagtggtaaaggtgcgaatgtcgatggatcacgaggcgatcggccactggttcaacgaggaggtgaaaggcaatcttgctctgctggacgaagtggagcaggctgcgcgcaccgtgaagggcagcgagcgttcctggcagcgtgccgggcatgaatatacgctgtggctggatggcgaagaggtgatgatccgcgccaatcagctggagttttccggcgacgaaatcgaggaggggatgagctactacgacgaagaaagtctctctctgtgcggtgttgaggatttcctgcaggtggtcgccgcctatcgtgagtttatgcagcagcgttaatgacgccttttatgtcgggtggcgcagaactacaggcccggcaagcaaaagcgccgccgggcatttcatagattacacggcaggaatattgcggccgtagtaaatctcgcgcatctctttccatagcaggtcggtaatgaccttgcgctcttcggcagtcaactcttccggtcgggtatggaacatgtagtgcttaaggtcaaactccttgagcaacattttggtatggaagatattttcctgataaacgttgacgtcgaccatgtcatacaacgacttcatatcgtcggacataaagttctgaatcgaattgatttcatgatcgataaaatgcttcatcccattgatatcgcgggtaaagccgcgcacgcggtagtcaatggtcacaatgtccgattccagctggtgaatcagatagttcagcgctttaagcggggaaatgacgccgcacgttgaaacttcgatatcggcgcggaaggtgcacaggccgccctccggatggctctccgggtaggtatgcacgcagatatggctcttatcgagatgggcgaccacggtttccggtagcgggccaggatgttcggtctggtcaatcagcttgggatcgacaggctcttcgctgaccagaatggtcacgctggcgccctggggttcataatcctgacgggcgatattcaggatattggcgccaataatagaacaggtttctgtcaggatctccgtcaggcgattggcattatagagttcgtcgatataggcgatgtagccgtcgcgctcttctgccgttttggcgtaacagatatcgtagatacaaaaactcaggcttttggtcaggttgttaaagccgtgcagcttcaattttttcaatttagttcacccccttatttcgcgtcacggtgcggacagagcatcatgcagatattgtggtaaggcgaaggccgccgtatggattgccggattgtagtaacggcaggtcaggttggctttgtgaaagcgcgcctgaatgatttcgctggagagatggcgcagcgcctcattgtcgctcgcccaggcaaaggtcatgatcccgccgtaataggttggaattgccgcctggtagaagctgacgtcgcgaaaatagtggcttagcttgcgatggctgcctaccgcttcatcctgttgcaggaagctgacgccattctgggcaacaaagatcccacccgggttcaggcagcgtttgcagccttcataaaaagccgaggtgaacaggctttctcccgggccgatagggtcggtacagtccgaaatgatcacgtcaaacgtttgcgtcgtctgattaacaaaattgacgccatcatcaatcaccagcgtaaagcgcggatcgtcataggcgccggcgttatggttcggcaggtactggcggcagaatgaaactaccccggcgtcgatttccaccatggtgatggtttcgatgctacggtgacgagagacttcgcgcagcatcgcgccatcgccgccgccaatgattaacacatgcttcgcgttgccgtgagccagcagcggcacatgggtcatcatttcgtgatagatgaactcgtcgcgttcggtggtttgtacgacgccatccagcgccatcacccggccaaaggcgcggttatcaaagatgatcagatcctgatgatcggttttttcgtggtacagcacgttatcaacgctaaaatactgaccaaaatggtcatgcagcgtttcatgccacagtggattatcggccacgataaggctcctccttcgttaacatctgttacacccgtaaaacgagtgcaacatcatagacaactatagatgaggatgcacggcggttattgcagcaatgaggcaggaataacagccaccgccccggaagggcggtggagaggatgaggctattttgccggctcgggttggctatctactatccgcacggaataaaccatggtggcgcctggcgggatttttggcggtaatcctttactgccataggccttttcaggcgggacgacgagcgtcacggagccgtggttctgtagacgcttcagcggttcgcgaaacaccgggggataggcatccagcttttgcgtaagcgcctgatctttcgcttccatatcgttgatcaccgtcccgtccgtcagcatctctttgatcaccacggtaaccaggtcgttaccgcttatttttcctttacccgggtaatcgatgcggctgtagacgccctctttaaagaccacatcttttttgcgcgcaaatgcctgctgatatttcttgccggcactgatgtttttctgctctattttattcaggttctgaaaaacctgctgcgacacatcaaacagcgccttgttacgttcctgctctccgagacgaagctggccgcgaaaggcatcttcgatgccctgcagcaccaggcctgcgtcgacggtaactccctgagtgcgacgggtggtaaggacgttgagcgcctcgcttcccatcgaggcgccgatcgcataagcctgctgttctcccgatgcgctgagtttggcagcggcgctctcgccgctgcgcgttttggactgtacagaaagctgcgttctcagcagttcgatttcatcttctttcatccgtagctgggcgttgtctttatccgcctgcaggcgataggctgccactatggccgccatctctggtggctcattttttggcgcagcggcgtcgttagcggggccatgcggcgctttatccgcggcggccagccgggtggacagcgattgtttatcggcgttaagggctttgacctgatcgagggcagcctgctgcgtcttttccgcagcggcgaggcgaatagtcagcgactgtttatcggcgttaagggccttaacctgctcgaggacggcctgtttctctttttccgcggcggccagccgggtcgccagcggctgtttgtcagcgttaagcgctttagcctggtcaagagcggcctgctgtgccttctccgcagcggcgaggcgaatagtcagcgactgcttatcggcgttaagggccttaacctgctcgaggacggcctgtttctctttttccgcggcggccagccgggtcgccagcggctgtttgtcagcgttaagcgctttagcctggtcaagagcggcctgctgcgccttctccgcagcggcgaggcgaatagtcagcgactgcttatcggcgctaagggccttaacctgctcgaggacggcctgtttctctttttccgcggcggccagtcgggtagccagcggctgtttgtcagtgttaagcgctttagcctggtcaagagcggcctgctgcgccttctccgcagcggcgaggcgaatagtcagcgactgcttatcggcgttaagggccttaacctgctcgaggacggcctgtttctctttttccgttgcggccagttgggtcattagcgcgtgtttatctttattaagcgtggtaaagctggcgctgaggcgtttattttcagcttcggcttgctgaatctgcgtcgttaattgctggatctgctgacgcgccgcggccttgctttgctgtagattattattctgcacaacgcctgctttttttattaatgcctctttttctgcagtagcggcgcttaaggcgacctgtaattcattaattctcttattcaacgccgcttgctcattcgctccggcagtatccgtttgcggcgtagcggcaagctgtttttttaattgctgtataagcttatctttttgtgcaatcgccgcctgctggctggtgattcttttttgtaattgtgaggtgttggtaccggtttttttattatctgcgctctggcggctttcttgtgtttgttttgcgcttgcggcatcgtttttttcttgcgcctgagattgctgggtttgctgttgggcgtaatcaagaaaggccggcgcggcgccggcggtgaagggggttgaaagcgccagcgcagcgacgagcatcagcaggggcgcgttgagggtcagcgtggcggctctgttcatggttgtttgctttcaccacgctgtaccaggctatcgatcagcgttttctggatatcggcgcacagtttgatggatttaaactgatacatggagtcaatgccaagccgggtaggatccgccactttctcgcgcacgctattgtattgtgacgccgcgcgcactaaagcgttaaagtcattgctgagtttagtggcttgctgtgggttaacctcttttagcgaatccaacgcctggcgacaggattcaatgcgcgcttgttcgctggccgcccgctcctgctctgcctgctgctgtgacgtcagcggcgtggcgatcggtttaaccggctggcgggaagaggtattgctacagccggctactaacagcgcggcgagtgggataacacgaagagtcagcgagatattcacaatttcagtccatgaagtaggtatatttttaccggattctagaagggtgctttttattttgcaatatatgaataatgatattttattagttttttagtcattcttcattattatgggtttactttatttggcaaattgataggttcgcaattaaataaggtttgtttatatacaataataaatataaatatttaaagggggaaattgaaatgctaaaggcgcggagcgttgccgcccgcgcagggaattatttaacgtaagccagcaggctgagcgaatcgcgggccagcgctttacattttttcgccgtcggaatgttaatgccgctaagatcgcgatagctgtcttcgcctagcgctttcatgttgtagctgtcatagttgctcaggtcccactggttctgttgggcaaagaacaccagcgcgcgacggatctgcgtgttgggcaggttctggtagccacagtcgtttttcagaaacacaaaaaccgcggttaaatcagccatatcttccgcttcggattcgctgagcgcgtagctgttggcggagagagcaagcaggctgccgagtaccattgttctgaaaagcgtcttcattttttctaccattagatcaccgacgcttcaaattagcatacttctttacacagcgccgatctttattcttactcttctgcttgaccttcccgttacggtagggtttaagctcaaatattcgcccgcagaataaaaggatgtgaatatgcaacgtcgagacttcctcaaactgaccgccgcggtcggcatggccagcgcattgccgttatggagccgggcggtctttgccgccagtcgcccggctctgccgataccgtcgctgttagccgccgatgcgcgcaaccgcatcgcgctcaggatccaggcgggcaaaacgcggtttggcgccctgaatgccactacctggggctacaacgggtcgctgctgggccctgcgctgcagttgacgcaggggaagaccgtcacggtggatattactaaccagctggcggaagagaccacgctgcactggcatggtctggaggtaccgggcgaggtcgacgggggccacagggggttatcgcgccgggtgccacccgcacggtaagcttcacgccaacgcagcgggcggcgacctgctggtttcatccgcatcagcatgggagcaccggccggcaggtggcgatggggctggccggcctggtgctgatcgaggatgaagagagcgggcgcctgctgctgcctaagcagtggggaatcgatgatgtgccggtgatcgtccaggataagaagttcaccgccgccggcgagatcgactatcagctggatgtgatgagcgccgccgtcggctggtttggcgatacgctactgaccaatggggccctctatcccgaacatgccgcgccgcgcggctggctgcgcctgcgcttgctgaacggctgtaatgcccgttccctcaattttgccaccagcgataagcgcccgctgtacgtggtggccagcgatggcggtctgttggccgagccggtcaaggtcgatgaattgccggtcttgatgggtgaacgctttgaggtgctggtggacaccagcgacggtaaacctttcgatctggtgaccctgccggtgagccagatgggcatggcgattgcgccttttgataaaccacagccggtactgcgcgtccagccgctggtcattcccgcctccggcaagctgctggatactctggccgctctcccggcgttaccgtccctgacggggctgacgcagcgtcagctccagctgtctatggatccgatgctcgaccggatgggcatgcaggcgctgatggagaagtatggcgaccaggcgatggccggaatggatcacggcatgatggggcatggcgacatgagcgacatggggaatatgcatcacggcgacatgagcaaaatgagtaacatgaaccacggatccggcatggagcatggcatgtcgtcaggcaagggctttgatttccataacgccaaccgcatcaacggcaaagccttcgacatgaatgagccgatgtttgccgccgccagaggccagtatgagcgctgggtgatttctggtaagggcgacatgatgttgcatccgttccatatccacggcacccagttccgtatcctcagcgaaaacggcaagccgccagcggcgcatcgtcgcggctggaaagacaccgttcgtgtggaagggaacgtgagtgaagtattagtgaagtttgatcatccggcgccgaaggagtttgcctatatggcccactgccacctgctggaacatgaagacaccgggatgatgttggggttcacggtttaagtctctgcgacctgctgccatcccctacgggaagaaggacggaacaccaaaaaaaacggcaactttcgttgccgttttgcgttttatttggcgtcatccgggagcgcataggcgacaatataatcgcccattttggtaccgaacgagccgtgaccgccggcagagatgacaacatactgtttgccattcacttcgtaggtcatcggagtcgcctgaccgccggctggcagacgggcttcccacagcttctcgccgttgctcatattgtacgcgcgcaggtagttatctgcagtcgcgccgatgaacaggacgttaccggccgtggaaatcggaccgcccagcatcggcatccccatggtaaacggcagtttaaccggcatcgggaacggcaggctgtcctgcggagtaccgatacgttttttccataccacttcgttggttttcagatccagggcggagatatacccccaggccggctgtttgcacggcaggccgaacggcgacaggaacgggttcagcgttacgccgtacgggacgccgtactgcggctgcacgccggactccgtaccagagcctttcgcatctttcggcggctccatcggattgcctggcccgcgcgggatcagttttgagacgaaaggcagcgccatcgggttggcgatagccacctgacggttcggatcgacggagataccgccccattcaaacatccccaggttacccgggaacaccagcgtgccctgctcagacggcggggtgaagataccttcatagcgcagctggtggaagatcacgcggcacaccagctggtcgaacatagtggcgccccacatgtccgcgccggtcagatctttcttcggacggaagctcagatcggagaagggctgggttttggtaacgtaatcacctttggcagcgccctgcggaaccggtttttcaggcgccgggaccaccagctcgccgttacgacgatccagcacgaagatgttgccggttttcgctggggcatagatgaccggtacggttttgccgttgacctcaatatcagccagcgtcggctgggaaggcatgtccatatcccacagatcgtgatggacggtctgatagctccaggccagcttaccggtggtggcgttcagtgccacaatcgagctggcataacgctcttgctccggcgtacggttgccgccccagatgtccggagtggtcacgcccatcggcagatagaccagatccagcttagcgtcgtaggcggcaggcgcccatgagttcggcgagttgagcgtgaagtgatgttcatcgctcgggatggcgttcggatctttcgcacccggatcgaaggcccacagcagtttaccggtattcacatcaaagccgcggatcacgcctgacggctcgcgggtagagaagttatcggtgaccgcgccggcaatcacgatggttttatcggtgatgatcggcggtgaagtgggttcatacatgcccggcgtggtgaccggcatgttggtctgcagattgagaatacctttattagcaaaggtttcgcacagcttaccgttgtcggcgtttaccgcgaacaggcgaccatcgttcaccggcaggataatgcggcgcggacagtcggcgacaacgtcggcaggggcgttatccgctttcgcttcgtgataagaaacaccgcggcaggtgacgtgctggaacgacggatcggcgttcagctgcgggtcaaaatgccacttctctttaccggtggcggcgtccagcgcaaacaggcgctggtgagcggtacacaggaagagcgtatcgccgactttaatcggcgtcacttcgttagtgatttcacccggatcgttcggctgtttcaggtcgccggtgcggaacacccaggcttccttcaggttcttcacgttatcggcgttaatctgcttcagcggggagaagcgctggccttcctggttacggccataggccggccagtcgccgtcggcgacggtggaaatcggtgcggccggcgtagcgtcggcgctcagggtgccgttgacttcctgcgggtcgttaaaaccagcccaggtcagcatgccgccgctgatcagcagggcgacgaccagcgcgccaacggcgccagcggaaggcaccggcagacgacgccagacaaagggcaggatcagccagatgccaaagaagacgaggatatcgctacgcggcgtcaacgcccagaagtcgaaaccaacttcccagacgccccagatcatggtcgccagcagcagcgcggcgtacagccacagcgcagcgcgcttgccgcggaacagcattacggtcacgcccagcatcaccagcccggcgatagggtagtaccaggagccgccaagcacgaccagccatgccccgccgattaatagatagaggccgcagaacgctgcaaatagcgcagtcagcgtcaccaggagccttgattgttgagactttgtttcagccataaaaagttactcatgtgtttgttaaattttttaactgcaattaattataggatttaacaagtgtgatcggaatcacaaatatggctttattaatccctgcaccgaagatttctttttgctggtatactggatggcttgccggtcatcgtcggggcgaaagcagcggctttgatgatttatatttagaatcaaatggttagtattatgaaacatactgtagaagtgatgatcccggaatccgagatcaaagcgcgtatcgcggaactgggtcgtcaaatcaacgaacattatcagaacagcggcagcgaaatggtgctggtggggctgctgcgcggctcgtttatgttcatggccgacctgtgccgtgaagtgcaggtgccgcatgaagtcgattttatgaccgcctccagctacggcagcggcatgtccaccactcgtgatgtgaaaatccttaaagatctggatgaagacatccgtggtaaagacgttctgatcgtggaagacatcatcgactccggcaataccctgtctaaagttcgcgaaatcctcagcctgcgcgagccgaaatcgctggccatttgtacgctacttgataaacccagccgccgcgaagtgaacgtcccggttgaatacgtcggtttcgcgattccggatgagttcgtggtgggctacggtatcgactatgctcagcgctaccgccatctgccgtatatcggcaaagtcaccctgctggacgagtaaggggatatcccactctggacagcgcgcgccgcgctctccagggtggcgaagtctgaaggctatctgtggttgatgtgcttgatcttgaggttggagatcccgtggcgatagcgctgttcgagggtttccctgctcacagcggtgacatccagatcgcgcagcagtccgtcgtgaatcccgtaagcccagccgtggatggtcaccttctgtccgcgcttccacgcggattgcataatcgtcgaatgtcccagattgtacacctgttccatcacgttcagttcacaaagggtatccagacggcgctcctctggcatttcaccgagcagcgagctgtgcttaaaccagatatcgcggatatgcagcagccagttgtcgataagccccagctccgggttctccaccgccgcctgcacgccgccgcagccgtagtggccgcagataataatatgctcgacttccaggacatcgacggcatactgcaccaccgacagacaattgagatcggtgtggatcaccaggttcgctacgttacgatgcacgaacagttcgccaggctccaggccggtgagtcgctcagcgggaacgcggctgtccgaacagccaatccacaggaagcgcggtttctgcgtctgcgacagtttctcaaaaaagccggggtcctcttccaccagcatttttgaccatagtgcattgttgctgatgagtgtatctatatcattcatggacgttatcggcctgtaaccaagtaagtgcgttgcgctaatatagggtaagctcaccttttttaaaaccatcttaacccgtgatacttcaggctgcagatgcgttggcggcgtcagcgccggtccagcgcaaacgtgagtcaggcgggttaatgacgtgtcacgacacgagaagagatatttaatgaccattgctctggaattaaaacagctcaaaaaaacctatcccggcggggttcaggcgctgcgggggatcgacctgcaggtcgaagcgggggatttttatgccctgctgggcccgaacggggccggaaaatccacgaccatcggcatcatcagctcgctggtgaacaaaacctctggtcaggtcaatgtctttggctacgatctggagaaagacgtcgtcaatgccaagcgccagcttggcctggtgccgcaggagtttaacttcaacccgttcgaaaccgtgcagcagatcgtcgttaaccaggcgggctactacggcgttgagcgtaaagaagccctttcccgcagtgaaaagtatttaaaacagctcgacctgtgggaaaaacgcaacgaacgcgcgcggatgctctccggcgggatgaagcgccgtctgatgatcgcccgcgcgttgatgcatgagccgaagctgctgatcctcgacgaaccgaccgccggcgtcgatattgaactgcgtcgctcgatgtggggctttctcaaggatctcaacgatcgcggaaccaccattatcctgaccacccactatctcgaagaggccgaaatgctatgtcgcaacatcggcatcatccagcacggcgagctggtggaaaacacctcgatgaaagcgctgctgtcgaagctgaagtcagagacctttattcttgacctcgcgccaaaaagcccggtgccgaagctcgaaggctaccagtaccagctggtcgatacctcgacgctggaagtggaggttctgcgtgagcagggaattaacagcgtcttcgcgcagctgagcgcccagggggtgcaggtactgagtatgcgtaacaaagccaaccgtctggaagagctgtttgtcacgctggtgcatgagcgaaaaggagaatcagcatgatgcagctttattgggtcgcgctgaaaagcatctggaccaaagagatccaccgttttatgcgcatctgggtacagacgctggtgccgccggtgatcaccatgaccctgtatttcgtgatctttggcaacctgatcggctcgcgcattggtgagatgcatggttttacctatatgcagtttatcgtcccaggcctgatcatgatggcggtgatcactaatgcttacgccaacgtcgcctcatccttcttcagcgccaagtttcagcgcaatattgaagagctgctggtggcgccagtgccgacgcatgtgattatcgccggctacgtgggcggcggggtagcgcgaggactgtgcgtaggtatcctggtgactgcggtgtcgctattctttgtgccgttccaggttcactcctggctgtttgtcgccctgacgctgctcctcaccgcggtgctgttctcgctggccgggctgctgaacgcggtgtttgccaagaccttcgatgacattagcctgatcccgacctttgtgctgacgccgctgacctatctcggcggggtgttctactcgctgaccctgctgccgccgttctggcaggggctgtcgcatctgaaccccatcgtctacatgatcagcggttttcgcttcggcttcctcggtatcaacgacgtcccgctggcgaccaccttcgccgtgctggtggtgttcattgtcgccttctatctgctgtgctggtcgttaattcagcgcggtcgcggcctgcgtagctgatactcatcatggttagcgcttcctgaagtaaatatgcgaagcgctaaccgcttatctttgactcccatcaccgatacgtcatcttcaccttgctacattattcgctggctaaggagggaagcatgctcggatgggtcattacctgtcacgatgagctggcgcaggagatgctggatcgtcttgaacaaaagtttggtccgctggcccagtgccgggcggtcaattactggcgcaatctcagcagcaatatgttgagccggatgatgtgcgatgcgctgcatgccaccgactccggggacggggtcatttttctcactgacaaaaccggtgcggcgccttatcgggccgcggcgctgatgagccacaaacatacccactgcgaagtgatctccggcgtcagctatccactccttgagcgaatgtatctcctgcgaggcacgttaagcagcgtggcgtttcgccaggcgatcgtcagcgcgggcgggccgatggtgagcagcctgtggcatcagcagcagaagaaccccccgttccggttgcgccatgatgcctggggaaattaagcagcgggacagataccgcttttgttacaataaccgccgttgatggtataacggtttgatgcgtatgcttgcccgatttttgaccctgcttcttttcctgacctcactcagcgcctccgccagcctgcttagccagcagggcaaggctgtgcgctatatgcaaaccaccgaagacgcggtcatctgggcgcaggtgggaaaccatgtggtcagcgtcggcaatgttcgtgccgggcagatcctcgcagtcgtcccgacggcggctgactactatgagtttcgtttcggctttggcaccgggtttattgataaagggcatctcgagccggtgcagggcaagcagcgggtggaggaccgtttgggggatcttaataaaccgctgagtaaccaaaatttactcacctggaaagatacaccgctctatgacgctccctcggtaagcagcgcgccgttcggcacgctggccaacaatctgcgctatccgatcctcagcaagctgaaggaccggctcaatcagacctggtttcagatccgcattggcgaccggctggcgtgggtcagtagtctggacgcgcaggaggatcacggtattcccgtgctgacctatcaccatattctgcgcgatgaagagaacacccgttttcgtcatacgtcgaccaccacctcggttcgcgccttcacgaatcagatgacctggctgcgcgatcagggctataccacgctgaccctgtatcagctggaaggctatgtgcgtaataaaatcaatctcccggcgcgggcggtggcgatcactttcgatgatggcttgaaatcggtgaaccgctacgcctatccggtgctgaaacagtacggtttccatgccaccgcgtttattatctcctcgcgtattaagcgccatccacagaagtgggatccgaaatccctgcagtttatgagcatttccgagctacgccagatccaggacgtctttgatattcagtcgcatactcacttcctgcatcgggttgacgccggccggcggccgattttattcagtcgcaattaccataatattctgtttgatttcgcccgctcgcgccgggcgctgagccagtttaatccgcacgttctctacctttcctatcccttcggcggctataacgctacggcggtgcaggcggcgaatgacgccgggtttcatatggcggtaacgacggtgcgtgggaaggtgaagccgggggacaatccgtttctgttaaagcggttatatatcttacgcacggattcgctggagacgatgtcgcggctgatcagtaaccagccgcaggggtaataccgacgctgcgcctgagcgcagcgtcgcggccatcaggcgacctgtaccggaatagctttcgcctggcgcttcatttcgttgtcgccttcgaagtaggcgatgttaggctgccagctgcgcgcctcttcgtccgacatggtaacgaagctggcgatgatcaaaatatcgccgacgctggcgcagtgcgcggcggcgccgttaacggagatgatccgggagccccgctcggcggcaatggcgtaggtggagaaacggttgccgttggtgacgttccagaggtgaatagtttcattctccagaataccggccgcatccaggaagtcctggtcaatggcgcaagaaccttcatagtgcaggtccgcctgcgtgacttttacgcggtggagcttgccctgcagcatattacgcatcataacttctacccttcaaccttaatgtagcagagcggacacggcgcccgccctgagaaaagcccgggcagtattgcccgatttttacccgctgtctactgagcgagcgtgacgatccggttgtcgatcaggcgagcctgccccagccaggcggccatcaggatcaccgcgcgctggctggcatcggtcagctcaagcagggtgtcggcatcgcggatctgaatgtcgtcggcgcggaagcctttctcattcagctcctgttcagcgatagcgatgatctcatcgagctgccgatcgccggcggccagcttttccgccaccgcgctcagcactttatacagaccaggcgcgattttgcgctggtcggcggtcaggtagccgttacgcgaactcagcgccaggccatctttcgcgcggacgatcggcacgccgatgatctcaatgtcgtagcccatgtcggcgaccatcttgcggatcagcgccaactgctggaagtctttctcgccgaagcaggcgacgtctggttgaacaaggttgaacagcttactgacgatggtcgacacgccgcggaaatggcccgggcggctggcgccttcgagcatggtggataatcccggaacgtcgacgtaggtctggccttcagtaccctgggggtacacttccgccggcgtcggcgcgaagacaaagtcgacatgacgtttgttcagcttttcgcaatcatcctgtaaggtgcgcgggtagcgcgccaggtcgtcgacgcggtcaaactgcatcggattgacgaaaatactgaccaccaccacgtccgcactggctttggcttcatcaaccagcttcatatgaccatcatgcaggttgcccatcgtcgggaccaacgcgatacgtttaccctcctgacgcagacggcggatatgctgccgcagcagcagtacggattcaataatcagcacaacaagactccttaatggaaactgtgttcttcgcccggatagactccggattcgacttcggcaatatactgccgcaccgcggcgcggatgtcgcccgcttcggcaaggaaattcttggcaaatttaggaatgtggccgccggtaatgccgaaagcgtcatgcatcacgaggatttgcccgtcggtgacgttgcccgcgccgatgccgatcactggaatggtcagagcgtcggtgatgcgcttcgccagttcaaccggcacgcactccaggaccaacagctgcgcacccgccgcctccagcgctaacgcgtcttcaaacagggtctgcgccgcatcgccgcgaccctgcactttatacccaccgaatacgttcaccgactgcggcgtcaggccaagatggccgcaaaccggcaccgcgcgctccgccagcatcctcacggtgtcggccagccaggcgccgccctcgagtttgaccatattggcgccagcgcgcatcacgatggcggcatttgcaaaggtctgctcgggggtggcataggccatgaacggcaggtcggcaagcagcaggctgtttggcgcgccgcggcggacggcgcgggtgtgataggcgatatcttccacggtaaccggcagggtggagtcgtgaccctgcaccgtcattcccagcgagtcgcctaccagcagcacatttatgccttcatcggcgaacagcttcgcgaagctgtgatcgtaggcggtaatggtggcaaagcgcttcttttcctgtttgcatttctgcagcagggcaatggtggtcggtttcataacatttcctgatgatgaaagtcatattaaccggcattctaacagcagcattcagaggggcaatgattttgggcaaccgattacgacgatcgccgcaaatgctaaaaaagggagaggggattaccagctggcgggctttgccgcgccgagattatccagcacggcgcgcagcgccaggccgtcaggaaagtgaaggtccggggcgatctcgaacagcggccagagcataaagccgcggtttttcatatcgtagtgcggaacggtcaggcgctcgctgttaatgacagcatcgccaaacagcatgatatcgaggtccagcgtgcgcggcccccagcgttcggctttgcgcacccgcccctgctgcagttcgatgcgctgagtatgatcgagcagcgtctcggggggcagggcggtttccagcgcaacggcggcgttgagatagtccggctgatcctgcgggcccagcggcggcgtgcggtagaacgaagagacggcgaccacgcggctgtgcggaatttcgcccagggcgcggatagccgcctgtacctgctccagtggagaagcaaggttgctgccaagtgcgatatagaccagagtcatgcgctaccctggcgcggcgcgcgcttgcgcggacgacggtgacgacggcgcggcgccggatcgtccccgaggtcgttgagcatatctttttgcgccggcggcgcggcgacctggaattcgccccaccatttggtcaggcgctgcagttcgtggttgttctcggcgccggcgcgtagctccagcaggtcataggcggcgcggaatttcggatgctccatcagcttccaggcgcgtttgccctgacgacgggacatgcgcagctgcagctgccagatatcacgaataagggtggtgatgcgcttagggatcgccagcgtacggcaggcttcgtccagcacatcgttcatcgccagggcgaaggcgtcgtagtacgccaggccgctctcctgagcgattttttgcgccgtctccagcagcggataccaaaacatcaccgcgaagaggaaggccggattgacgcgcatatcgttatgaatgcgggtatcggtattcttcagcacctggctgatgatccgctccatcgggctgtcgccgcgctcggtaaagtagcgggtgatggtcgggaacagcggctggaacaggctgtattcccgcagcagcatgtaggtctggtagccatacccggcctgcagcagcttgagcacttcttcgaacagacgcgctggcggcacatcgtggagcagggcggccaggcgcggcagcggttcagccgtttccgggctgatggtcatattgagcttggcggcaaagcgcaccgcgcgcagcatgcgcactggatcctcgcgatagcgggtttccgggttgccgatcagacggatcacgccgtcctggagatccttcatgccgccgacgtagtcgcgaacggtaaagtccgccacgctgtaatagaggctgttgatagtgaagtcgcgacgctgggcatcctcctcgatcgagccgaagatgttgtcgcgcagcagcatgccgttctggccccgctgggaggtgacgcgatcggtggtatgcccttcgtgatggccacggaaggtggcgacctcaatgatttccggcccgaacatcacatgtgccaggcggaaacgtcgcccaaccagacggcagttgcggaacagcttgcgtacctgatccggcgtggcgttggtggtaacgtcaaaatcttttggctttttgccaagcagcaggtcgcggacgccgccgccgaccagccaggattcgtagcccgccttgttgaggcggtacatgaccttgagggcgttttcactgatatctttgcgggaaatagcatgctgctcacgcgggatcaccgtcataggcgttggttcgacggcggcttctgcctcgcgctcctcacggcttagcaccttacggcaaaaattagcgactcgggtaaaaatggtgcacctcgtagtgtcagacggacttcagatcaactgtacagtgtaaaaatagcggctaatcatagctcagcgggagccatttgagaatgctcgattttcgccggctgccagttggcgacggcctgggcgagtaaatcatcgatgctcagggcctgccactcctcggggatcgcctgattcagaaagcggagcgcccggacgatttcggggcgcggatcgccttccggcagcgccggcgcgtggttttgtttagagagtttattgccgtcgccattgagagccagcggcagatggaggtaatccggcgcctgccagccaaaatgctgatacagcgaaatctgccgcaccgtcggctcaatcaggtctgcgccgcggacaatctcggtgatcccctgaaagtggtcgtcgaccaccaccgccaggttgtaggcgaacagcccgtcgcgacggtggataataaaatcctctcgcgccagcggctcattggcgatgagcgtgccgcgcagacggtcgctaaactgcagtaccggacgggtttggcgcaggcgcagcgcggcgttttccgcccccagcccgaggtcgcggcagtggccgtcgtagatcccgcccacggcgtggatccgcgcgcgggtgcaagtgcagtaatagctcagcccttgctcgcccagccacgtcagcgcctcgcggtaggcttcgtgccgttgcgactgccacagcacgtcgccatcccagtgcagaccgtagtggtcaagctggcgcaggatggtatcggcggcaccggggacttcgcgcggcgggtcgatatcttcaatacgaacacgccagatgccctggttcgcgcgggcttgcaggtagctgccgagcgcggcgatcagagagccgaagtggagttcgccggagggggagggggcgaagcgccctatatagcgtgagtcagtcatggtacggacaacagaaccaggcgggagagactcccgccagagagtgaggcagcaggggattagcccgccatctgtttttcgcgaatttccgccagggttttgcagtcaatgcacagatccgctgtcggacgcgcttccagacggcgaatgccgatctccacgccgcaggattcgcagtagccgaagtcttcgtcttcaacttttttcagcgttttctcgatctttttgatcagtttacgttcgcggtcgcggttacgcagttccaggctgaactcttcttcctgggcggcacggtctaccgggtccgggaagttagctgcttcatcctgcatgtgcgatacggtgcgatccacttcatccctgagttgattacgccatgcttcaagaatacgcttgaagtgcgccagctgggcttcgttcatatactcttcgcccggtttctcttggtacggctccaccccagcgatggcgagaatactcagggacgatgttttacggttttgcccttcttgcatgttgcttctccttaacacgcactatcgatccccatgtgggggaaaatcaggccgctataaatagcagatgcttttccggatagcaattatctaaacgttacacttgacaaccctgtgaagaaaagcgtattcgcgcttgcgacccgaacactatttagccacttatttaccggggtttaacaccacggcgatcggcttattcagagtcatcctcgtcgtagaaagttccgctttccaggcgagaatttccacccccttgtcctgggcttctgttaacagctgtgcgtatctggcatcaatatgatgcgcgggagaaaaacggtcaattgccgaatgcaggacggcaaataaaatcaccgcgcggtcgccatttgccgcgacggccatcagttcccgcaggtgcttctgaccgcgcgtggtcaccgcatcgggaaaataaccgtattctttctccgccaacgtaaccgatttcacttcaatatagcagttttgtcggtcatctgcctgtaacataatatcgatacggctattctcttcgccatatttcacttcgcttttcagctggttatagcctgaaagttcaggaattattccggcggaaatcgcctctttcgccaaagaattcgcgcgcagcgtattgacgcaaataactgcgccctgctgggtttcagttaattcccaggtgtgggcatatttgcgcttcgcattgtctgaggtggaataccagacggtgtcgcccggggcggcgcagccggtcatcgccccggtattcgggcagtggagcgtcagctcgcggccatcgggggtgaccacgtcagcaagaaatcgtttgtaacgtttaagcaaaatggcgggctgcaacggcggatcaaactgcatcaactttccttatcaaacggataacgttccagcgccgtgtagcgcgtgcgcccccggctaaagctggactcatagagcacgaactcgttcaccggaaatgtccagcgaaagccgggggccgggatcggcaccgcctggcgagcatcgcgccacagggtaatatgcgggtgaaacggctgcgggctctgatagcagccgctgcgcgccgcctgagcgcgcaacatgctggcgagctgcagcaggccgcgcggcggctggcgggttccgagccacaccactcgcgaacgtagccactgtccggcatcgtccagcgtcagggtaaagcccggctggcgcaggcgaccagcgagagcggccagcgcccgctgtttttccgcgctcacctcgccgagaaacgccagcgtcagatgaagattatccgccgcgacgggcctgccggcatcttcggggaagtgcgttgcccgccactggacaatctgcttctggacggcagacggcagttcaagcgcaaaaaacagccttttcggctcagacatgatagagactcggtaatgaattagggggatgctacaatgcgaacccctgaatgttaacccccggagccttttgtgtcctcattgccggttgccgctgtccttccagaactgttatccgccctgcagcatgcgccgcaggttttgctcaacgcgccgaccggcgccgggaagtcgacctggctgccgctgcagatcctcgccgagggcaacatcgcgggacgcattatcctgctcgagccgaggcgcctggcggcgcgtaatgtcgcgcagcggctggctgaactgcttggcgaaaagccgggggagaccgtgggtttccgcatgcgcgccgaaacctgcgtcggaccgcagacccgcctggaggtggttacggaggggatcctgacgcgcatgatccagcgcgatccggagctgacgggcgtggggctggtgatcctcgatgagtttcacgagcgcagcctgcaggcggatctggccctggccctgctgctcgacgtccagcaggggttacgtgacgatctcaagctgctgatcatgtcggcgaccctcgataacgatcgcctgcagcgtctgctgccggaggcgccggtggtggtctcggaggggcgcgcttatccggtggagcgtcgcttcagcccgctctccgcgcaccagcgttttgatgaggctgtggcggtagcggcggcggagctcctgcggcatgaacagggatcgatgctgctgtttctgcccggcgtcggcgagatccagcgcgttctggaacagctgacggagcgcgtggcggaggatgtcattctctgcccgctgtatggcgcgttgcccttaagcgaacagcgcaaagcgatcctcccggcgccggccgggaagcgcaaagtggtgctggccaccaatattgccgagaccagtttgaccatcgaggggatccgcctggtggtcgacagcgcccaggagcgggtcgcccgctttgacccgcgcaccggcctgacccggctggtgacgcagcgcatcagccaggcatcaatgacgcagcgtgccggacgcgccggtcgtctctccccggggatctgcctgcatttgctcggcaaagaacaggcggaacgggcggcggcgcagagcgagccggagatcctgcacagcgatctgtcggcgctgttgctggagctgctgcagtggggctgccacgatccggccgcgctggcctggctggatcagccgcccgcggtcaatctggccgccgcgcgccgcctgctggaggcgctgtcggcgctggacggcgagcggctgtcggcgtttggccgcaaaatggcagcgcttggcaacgagccgcggctggcggcgatgctggccaccgcgcagaccgatgacgaggcggcgacagcggcaaagctggcggcgatcctcgaggagccgccgcgcggcggactggtggatttgggggccgtcttttcccgtcagcaggccaactggcagcagcgatcgcagcagctgatgaagcgcctggcccgccgcggcggccagcccgatgccgggctaatggcggggctgctggcgtcggccttcgccgatcgcatcgcccgccgccgcggtcaggaggggcgctaccagctggcgaacggcatgggcgcgatgctggacgccgacgacgcgctgggccgtcatgaatggcttatcgctccgctgctgctgcagggcagcgcttcgccggatgcccgcatgctgttggctctgccagtggaaatcggcgagctgatcgccgcccgccctgaactggcgaaaagttccgacacggtggagtgggatgaagcgcagggtacgctgaaagcctggcggcggacggtgatcggccagttggtgatcaagacccagccgctggcgaagccctctgaggcagagctgcatcaggcgatgctcaacggtattcgtgagaaaggcctcggggtgctcaactggacgccagaggctgagcagctgcgcctgcggctgtactgtgcggcgcagtggctgccggaagaggcatggcccgcagtggatgacgcttcgctgctggcctcgctggaggcatggctgctgccgcagatgaacggcgttcattccctgcgggcgctgaaggcgctggatctgcgtcaggcgctacaggactggctgccatggccgctgcgccagaagctggatcgcgagctgccgacgcactataccgtgccgaccggcagccgcctggcgatccgataccatgcggagaacccgccagcgctggcggtgcgtatgcaggagatgttcggcgaggccacgacgccggtgatcgccgagggacgggtgccgctggtgctggagcttctgtcgcctgcccagcgtccgctgcagatcacccgcgatctgagcgccttctggcaagggagctaccgcgaggtgcagaaagagatgaagggacgctatccgaagcacgtctggccggacgatccggccaacgccgccccgacccgccgcagcaaaaaatactcgtagccgccgctgccgggcggcatcctgcccggccagtcggttcgcaaacgctagatcatctgctgccagagaaaaatacccccgccggccagcgccagccaggggccgaaggccagcggctgctgcagcgactgccgggtccacaggcgttgcagtagggtccacaccagcccgctggccgaagcgagcaacagcacctgcggcagaacctgccagccgcaccaggcgcccagcgccgccagcagcttaaaatcgccatagcccagcgcctctttcccggtcagcaggcggaacagccagtagaccgaccacagcgccagataaccggccatcgccccggcgaccgcatccggcagggcaatgtacacctcgttaagattgaacagcagcccggcccacagcaggggcagagtcaggcgatcgggcagcagctgggtccgggcgtcaatccgcgccagtatcagcaggaacgagagcagcaccaggccgcccgccagcggcaggcccggcgccagcaaagctccggcgaggataaacagcaggccggtggccagctcggtcagcggatagctccacgcgatgggcgcctgacagcagcgggcgcgacggcccagccagaggaaactgagcagcgggatattgtcccgccaggcgatcggctggcggcactgcgggcaggaagagcccggggtgctgagggttatccgctcgtcgtccgcggtctgggtcaacatgcgcggcagacgatagatcaccacattgtaaaagctgcccagcgccaggccgaacagcagtagaaagccataccagacaaagggaaagtgcagcgataacgcggctagtgtcgtcatttttgctcctggggtaaccattttccctgcagctgccacggcgtcgggcccggggcgttattcgctgtcgggcgcgtgaccagcagcgccagcagcggcggcatcccctgccggggctgtagcgtgccgcgaaacagatagcggccatcgggcgacagagtcccctggccgctgaggctcagctgacgagagtcctgacggagagtcagcgccacggcgccgtccaccgtacagcggaaggtgccattaacctgggccagctccaggctgccgaccggggagtgcagtcgggcctgccgccactgcgcgcctccggcgatgatatgccggcagcgtccgtcgctgaaccgcccttcggtcaggctgaaggtgacctcccccgcggccttgacgggcatagtcgacatcaaccagcggctgagcaggctggcgggggcggtgagccgcccctcctgtaggcgcagatcgcgaaggccccacagccgggcctgacccatcacgccgcggggatcgctgagagagacctgccagcccgccagggtcagcgaccacgccagtcgttcaagccgttccccatgccagtagaccggttgcgccgcgccgcgccagacgctgccgctaaactgccccacctgtacgccgggcggcagcatgggggccagcaggcgcgccggagccgtggcggtgagccacaacagatagaggaccagcagcagtccgcccgcgatccagttagccttcatcgtcgcgctccagcagcagatggttgaccgtgacccagccgggtcgcgacggctgcccggtcacggacagcgagatcgcgttgacgccgcgcatcgccggagcgtccagccagtcgatcagcgcctggaaagcgcagggctgaagggtgatctgcagacgttttccctgcggctgcaggcggatgaccgtcagtccgtggctcgccgcctcgcgcatcaccagcgcggtgagcgcctcttttgccgccggcgcgggctgctggctgagctgctgcaggcgcggagcctgctccgtcatccagcgcaggctggcctgctctttcaccagggtttgccgccactgcgcctcgcgggctcgccagggctgccacagcccataccagaaggcgcatgccgccagcagccctgtcagaccaagcaacaggcgctgctccgacggcgtgcgctgccgccaccagataagcagattagccatcgttttcctccagcgtcagttgtccctcaatgccatccggtttcgtgatcatgtcgcccggccggacgcgaaaccgcggctgcgcccgctgggtaaactgctccagcgcccgggaagagaccgcggcgatatccagctgcagacgattgcccgcggcatcccagctcagcgctcgcagacggatccccggcgtttcgctgaggatgttttgcaaggcgctgaggcggtcgacgaggggggcatgctgcgcctgacgggtgagggtttgcaggtgctgctgcatctgcagtcgtgggttaatcacctttttctccgtcggaaaccagcggtgatagaaggcccggctggcctgttgcgccgcctcggcctgacgcgccagatcgcgatggtccagcacgctgtttgcccctgccagtaacgccagggccagcgcggcataccgcgccggacgccagctcgcctgcgcagaccgccgccggtcggcgaactccccctgcagcagactgagtttctgcgctgccggatggcgtgcggcaagtgtcagcaatgtctgcgcaggctgctcccgccaaacgcccggcgccgcgggcggcggcgaatagctgtcgatgacgtgctcttccgcctcgctctgcagcagctccgtcagccagacgttttccgccgccatgccgccccacggctggtggcggatcagccactgctcgtccacctgcaccgcgctccacgccggcggttgccagggcagggccagcacgtcgggcgtcaacgccaggggctgtaaggagagcgattcgcagcgcgccagccagtcgcgcattttttgccgctgtacggcgacgatctcgcactgggcctgctggcggtggagcagagcaaaatgggtggcttccacatcgtctgccagctgctcttccagcagaaacggggccacctgcagcggcggcttacgcaggcccgccggtagggtgagcgagtgaaacgcgcagtcgctggccgggatcagcacccaggccgggtactgctcagccagcgccgggaaagggctggcgtcgtcagtcggccaccggccgctggcctcgtggtgcggctcgccgggggcgaagagttgccagtgcagcggcgcctgcgcggcggcgaggcgcacgatcagcatggcctggggagaagcattaatcttgttcatcgaccaccatagagagtccatatcgccgctggacgacggtaaacgtgcgccccgattgttgcaggacgctgtgcagctgaaagcggagattgccagtcaccacggtaaaagcggcgataaagcgtgcgctgtgcaccgtcagccagggacgggcaagcgtggtatcggttttctgcagcgtcggctgcgcgagaaaggcggcgacgctgctccacccggttcgcgggcggttgtgcagcagctgttgcgcctcctgcagcgtcagatcgccgggaaagagggccaccagcagggcggcctgggaggggcgcagggtgttgacattgacctgcagcgcgtcatccggctggacgcagacgaaggggagcaggcgctgatagagcgcggcgtccatcccggccagcaggcgcaactcgctgacatcctgcatcggctggttggcggcgagatagcccggggtttgcgccatatagacctcgtcctccgccccgttcagccgcggctggccgtcgctgtccgtccagtcgccaagggcggcggcgatctggctggcgcgcagcggcggctcgccgagcagcgccagcagccgaacgaagacgtcggtcgggtagggcgttccgtcgccagcctcatccgcgcgatggtcaatagcattgaggttgaagcaggcgtgcccgtcgcggatcgtggcgcggatttcgccatcgtcgagggtaaagcggcgcccctcctgcgcccaggtttgcgccagattcgtttgactgggcgagtccagcgcatcgcgttgcagcagcgcggcggccatattttccgccgccagggcgtaccatctggcctgcaaattatcgagggtcacggcggtatgttgatacatgaccgcggtgcgctcggtcatggcgctggcgaggatcatcattagggcgaggatgaacagcaccatcaggagcgcgacgccgcgttgccgatttatcactggccgcctcccggggtgagtaaaaacaggcgggttatctccccgctgttcgccagcgtcagggtgatctccagcccctggggcagcgtctgcgggcggtcccaggtttcctgccagcgcccgtcggcgtaaaaccgcaggcgaaacgcggttacctcgcgcagcagcacccggaccgtcggctggctgccggtcagcggatcctgctgatcgaagctcagacgctcaagccgctgctggcgcagacggtagctgacgttctggatctccgagcgcgggaggatccccagcgggtttggccagccgctgcggctgaaggccagtccccagtcgtcgctctgcaactggaaacgtccggcgaagaaaaacgtgtcgctgtttctggcgcgacggggaatgatgtgggtgacatcgtcggcgatctggcgaaaggcgcgctggagggccgcgatctgctggcttttctcgcgggtcaggccatcggcgcggatgacgttctgcagcaccatcacggcggcggcgctgaggacggcgagaatagccagcgccagcagcgtttcgatcagagtgaaaccgcgcattttcgttatcatggcggcgtcacccaggtgcgcagggtggccagcggcgcgggatcgcttttttgccgccggacctccacgtccagcgcccgcagctgcggcagcgcggtttccactccctgccagcggacaaaccagcgcgtcccggcggcctccacggtggtttcagaccagctgagggcaggccagcgtttctccagccgcagctgcaccagctggttatccgccagccagctggcgaggattttctcttccatacgcccgagctggcgcgtctgctgcagggtggactgcatcaccgccaggccagcgagggcgaaaatcaccagcgcgaccatcacttcgataagcgtcattccggcttcacgcttcatggctgctcccgcgccgccagcggctggctgtcgccctgggcgtcgacgtttatgcccgtcgcggcgtcaattcgcagctgaaacggcgtgacttcaccgccgggaaaaataagcacgtcgggctgctcgcccggcgtccacgcctggccgtcgggaaagcgcagcgtcagcctggcccgcgggagggtttccgccgtggtgacgcgtccggcctgcagcggcagccactgcgcgttgccccaccggtcgtcagccgccgccggggcgctatcgtcggcaggctgcaggcgcataaactgccagcgctcagggtggatgataatgccgaagagctgaccggtttgctgcccgcgctcgcggacaaaatccagttgcgcctgaaagcgcgccaggatctgtgtggcctcttgggtgcgggcggagggaaacgccagcagcaccatgctggcgctgacgccgatcagcagcaggaccagcatcatctccaggagggtgaaaccgcgctgagacactatttcttcccgagggtccagttgccgatatcgtcattggtgtcgggcatcccgtccgggccgacgctgaagacgtcgatggcgccatgctgacccgggcttaacagctgatactcattcccccacgggtcctgcggcagacggcggatatagccgccttccgggtagttgcgggcatgcggctcggcggccggagcggtcaccagcgcctgcagtccctgttcggtgttggggtagcggctattgtcgagtttatacatgtccagcgctccctcgagcgccaccagatcgctgacgactttctggcggtccgctttctccttgttgcccatcaggttaggcaccaccaggctggcgagaatgccgagaatgacgatcaccaccataatttccagtaacgtgaaaccgcgttgccgttgcatagttttctccattaatacagttacatactcataagggtgttcagttgcaggatcggctgcaggatggccagcacgataaacagcaccatgccggccatggtgaccaccagcagaggctcaaacaggctgagggccatctggatctgcgcgctcagctcccggtcctggttctccgccgcgcgctccagcatggcggtcagttctccgctctgttcgccgctggcgatcatgtagcgcatcatcggcggaaacagggcggtggattccagcgcccgatgcagactgacgccttcgcgtaccgattcgctggccgccgccagctggctgcgcgcccaggcgttgctgaggacgtcggcgctgatgcgcatcgacagcagcagcggcaccgcgctggcattgagaatgcttaaggtgcgggcgtagcgcgcgctgttgacgctgcgggccacgcggccgatgaccggcaggcgcagcagcgcccggtcccaggcgagccgccgggcgggctggcgcagcagatagcgcagcgccagcagcgccagtaacgacagcagcgccagccaggggcccgcgctgcgcacgatgtcgctcaggctcattagcagccgggtagagaagggcagggcctgtttaagatggacaaactgctcaacgactttcgggactacggtggagagcagaatggcgatcacgctgatagcgaccagcgtcagtacgatggggtagatcatcgcctgcagcaggcgggcgcggagctgctggcgctgctcggtatagtcagcaagccggttcagtacgccgtcgagatggccggaggtttcgccggccgccaccatggcgcagaacagcccgtcgaagcaggcgggatagccgcgcatcgcctccgccagcgagtggccttcgagcactttgctgcgcaccccggccattaacgttcttagcgacggcttttcgcactgctgggcgacggcatcgagcgccttttccagcgggatcccggcggcaaccagagtcgccagctggcgggtgagcagggctaaatcaccggcgctggtacgccgggtaagggatccgccggcccacagtcgccgcgccgggtcggcagttgtcacttccagcgccagccagcccttgtcccgcagcagctggcgggcgtggcgggcggagtcggcctgctgaaggccgcggcgggttttgccctgcgcgtccagcgcctgatagcgaaacagggccatcttagacgctttccgtcgtttgctgttcggtgacccgcatcacctcctcccagctggtgatccccgccagcgctttgtcgcgtccggcatggcgcagggtttgccaggctggccccagctgctggatcagggtgatctcgttctcgccgcggtggatggcggcgcgcacgcggtcgtcaaccagcagcagttcatggatcccggtgcgtccgcgatagccgatgaaattacactccggacagcctttgggctgccacagccgcgcgccgaccgggaccgccatctgccgggcggtgttggcatccgcctgccagggctgacggcagtgcgggcagagttggcgcaccagccgctgcgacatcaccgccagcagcgaggtggagagtaaaaaaggctccacgcccatatcctgtagacgggaaatggcgcccagcgcgctgttggtgtgcagggtcgacagcaccaggtgcccggtcagcgaggcctgaacggcgatctgggcggtttcgccatcgcggatttcgcccaccagcactacgtccggatcctggcgcaggatggcgcgcaggccgcgggcgaaggtcatctcgactttggcgttgacctgggtctggcctatgccctccagctcatactccaccggatcttcaatggtcatgatgttgcgctcccgggcgtcgaggcggctgagggcggcgtagagcgtcgtgcttttcccggagccggtcggaccggtgaccaggatgatgccgtgcgggcgggcgatcagcgcatcgacccgatcgagcagggcgggcggcatgcccagcgtcagcagatccaggttgacgctgtttttgtccagcagacgcaggacgacgcgttcgccgtggctggagggcagggtggagacgcgcacgtcgattgctcgcccgccgatgcgcagcgccatgcggccatcctgagggacccgcttttcggcaatgtccaggctggccatcaccttgatgcgcgaaattaacagggcggccagccgccgctgcgggcgcagaatttcgcgcagcacgccgtcgacgcgaaagcggatctgcagatggcgctcgtaggtttcgatatgaatatccgaggctttctctttgatggcctcggtgagcatggcgttgatcaggcggatgatcggcgcgtcgtcctcgctgtcgagcagatcgtcggtgtccggcagctcttcggcgagggtatagaggtcgagctcgttgccgatgtcggccatcatgcggtgcgcctccgccgaatcacgctgatagctgagcaccagcactttctcgaacgcgtccggcgccagacggctgacgcgcatcggcccgtccgccaggcggcgcgcttccagcagcgcccgggcggcggtatcggggcggcacagcgcttcgcagcattcgccgtcgctgagcagcacaagatggtgcgcgcgggcccaggcgaagggcaacagcggacggcgttcggcggctggcgtcatgggcggcctccgagattgaaggcgtcaatggcggcgctgacctggcggaaggcctgggtctcctgctgcggatagatgtgcagcaggtcgttgctgagcgacgcttcgctgctttctttaccccgctgtttagtttgcgcattgttgaaggcggtgtactggccggaagaagcctggcggtactcatcgcgatcgcgaatgatggtcgggcggataaacagcatcaggttgcgtttcgacactttcttgctgtcggagcggaacagggcgccgatcaccgggatatccccgagcagcggcactttgtcagcggtatcggtgacggttttatccagcagcccgccaaccaccaccgtttcgccgctgccgaccagcacggcgttattcaccgtccgggtattgaaggtcgccccgagatcgctgctggtgctggaggccgagtcggcaacgctcgatacctcctgctcaatctccagcagcaccgcatcgccttcgttaatctgcggtttcaccttcagtttaatgccgacggttttgcgctcgacggtattgaagatgttgtcgcctgaggtggtttgcgagccggttaataccggaacttcctggccgacgttaaaagtggcttgcatgttatcgagggtgacgatgctgggggtggccagaatatcgttcttggtactgctggagagggcggtgagcagcatcgcccagttcccctgatagaagccggcggcgataccattaaacgagccgagggcgctggccagcgagctgctgatggtaccgtctttgttgtactggttggcgccggcgatagccgtcgatatcggcaaaccgctattggtgaactgcgtcatgccggcgtttttgtttgcccactggataccgagattaaggccatcggcatcctgcacttcggcaataatcgcctccaccagcacctgcgggcggcggatatcgagctgggcgatcacccgctcaagatcgttcatcacgtctggcgccgcggtgacgatcagggcgttggtctggccgtgggctttgataataatatttttgtcgatcgcggccactggcctggcgctttgcttgtcgctctgcagcgagctgctgatcccggtcagaacttccaccagatcggcggctttggcgtacttcaggtagatcactttggtgttaccctgtaccgcctgctggcggtcgagctgtttgatcatggcgataatgcgctggcgcgagtttggttcgccgctcaccagtaccgcgttggtgcgctcatcggccaccacgttcgccaccatcgagcccggcagcgccgacttgctggtatctttattaagctcggtaaccagtttgactacttccgcggcggaggcccaggaaaggggcacggtcaccacgctgcgatccccggcgttgtcgacgcgctcgacaatggtcagcaggcgtttgataaccgccgcgcggccggtcatcagcagtacgttggagggctcataatggaccacgctgccggcgccagcgttatcgttcagctggcggagcagcggggcgagatcgcgggcggcgacgttggtcaggggcaccacccgggtgaccacttcatcgccttcgcccggcgcggccgcgctggcgaccggcacggccgaggtcttggcgtctttggcgcggaccacttttagcacgccgttattcatattgatcacggcgaagccatatacatccagcacgctgaggaagaattgataatattgttcttcattgagcatatcgtaactgcgcacggtgatagtaccgcgtacgctgggatcgataatcaccgttttattcaggtttttgctgacggtattgataaattcctggatatcggtgcctttaaaactggcggaaaattcctccgcggcggccggagaaaatagcagcggggttaatatcagcagcgcaggcagcatttttcgcaggcgtttcatggttggcaattattcatcccccagcgcgaaagcaatatcgtgtcgttggccttcccgctcaacggttagcgttatttcggtcatgtcggccagattttgcagcgcctgttgcgcttgctcctggtcgcgtaaatcgatgccgtttaaggcaatcgccaaatcatttgcctgcaggccggactggcgaaacagcgaggcgtctttgcctgggttcagccgataacccagcagtttgtcgccgctgagtaccggcgaaatagataaataagtgaggatattttgcggctgttcgcggagtcgcttcacgaggggcgggttgcccgcggcggtgggcggcggcgacggcgcgcgactgtcgttaaataataaaatggcctctttgcgcccctgatagttgacgatgatccggtcaggcagaatggcggcgatccgcgcatcataccctgggagaggatcgcccgtgctaaggctaacctgctgatttcccttttcgataatagcgatggagcgcgccgggttgctgctggcgagtagcccggccaggcgtagcttcaggctggaaaccggcacctgattgagactggcagcatccgttggcgtggggctaattttcaccgccaggccaaacagggtaaatgcgggccgcacattttttaattccggatctgccggcggaggcatggttaacggtagggcggaaatatcctcaggactcacagggaataccacgcgccaggttaatttcgccagctgtgggatagcggttattaatatgatgagcgtcacaatttgtggtaataatttaattatccctttatttatatttgttaacctcatcacagaaactggcattttaattcctttgctaatttatttttctgcacgttggcgtaataccctaccgaaacaggtaggtgattattggcttttgaattatttattgccggagagtggcgataagcgtggcgaatcataatcagtttgcggtttcgggtcgtcattccctttattgatttactcccccggcttcctacgccccccgctcatttgtgggggatgattgcgcctgggaaagcaaaaatatctaattagcgcgctgtaaagatattcatcctttcttaccttttataatttaataagcatattagggactatcgaatgctcagatatacctgtcatgccctatttcttggatcgttagtattattgagtggctgtgataacagctcttcctcttctacctctggctcaccgggttcaccaggcaatcctggcaacccaggcactcccggcacgcccgacccgcaggatgtcgtcgtccgcttaccggacgttgccgtcccaggcgaagcggtgcaggcttccgccaggcaagctgtcattcatctcgtcgatatcgccggcatcaccagcagcacgccggccgactatgcgacgaaaaacctctatttatgggacaacgaaacctgtgacgcgctgagcgcgccggtggcggactggaatgatgtcagcaccaccccgaccggcagcgacaaatatggcccttattgggtgatcccgctgactaaagagagcggatgcatcaacgttatcgtccgcgatggcaccaataagcttatcgacagcgacctgcgcgtctctttcagtgatttcaccgatcggacggtatcggtcatcgccggcaacagcgcggtctatgactcccgcgccgacgccttccgcgccgcctttggcgtggcgctggccgatgcgcactgggtcgataagactactctgctgtggccgggtggggaaaataaacccattgtgcgcctctattacagccacagcagtaaggtggccgccgacagtaacggcgaatttagcgataaatatgtcaagctgacccccaccaccgtcagccagcaggtaagcatgcgcttcccgcatctcgccagctatccagcctttaaactgccggatgatgttaacgtcgatgaattgctgcagggcgagacggtggcgatagccgcggaaagcgatgggatcctgagctcagccacccaggtgcagaccgccggcgtgctggacgatacctatgccgccgccgccgaggcgctgagctatggcgcccagctaaccgatagcggcgtgaccttccgcgtctgggcgcccacggcgcagcaggtcgagctggtgatctatagcgcggacaagaaagtgatagccagtcacccgatgacccgcgatagcgcctccggcgcctggtcctggcaggggggaagcgacctgaagggcgccttctaccgctacgcgatgacggtctaccacccgcagtcgcgtaaagtcgagcagtacgaagtgaccgatccctacgcccacagtttgtcgaccaactcggagtacagccaggtggtcgatctcaacgacagcgcgctgaagccggaaggctgggacgggctgacgatgccgcacgcgcagaaaaccaaagccgatctggcgaaaatgacgattcacgaatcgcatattcgcgatctctccgcctgggatcaaaccgtgcctgcggagctgcgcggtaagtatctggcgctcaccgcccaggaaagcaatatggtccagcatctgaaacagctgtcggcctcgggcgtgacccatattgagctgctgccggtcttcgatctggcgacggtcaatgagttcagcgacaaggtcgccgatattcagcagccgttcagccgcctgtgcgaggtcaatagcgcggtgaagagcagcgagttcgcgggctattgcgacagcggttcgacggtcgaagaggtgctgacccagctgaagcagaacgacagcaaggataacccgcaggtgcaggcgttgaatacgctggtggcgcagaccgactcctataactggggctacgatccgttccactacacggtaccggaaggatcctacgccaccgatccggaaggcacggcgcgtattaaagagttccgcaccatgattcaggcgatcaagcaggatctgggaatgaacgtcattatggacgtggtgtacaaccacaccaacgccgccggcccgaccgatcgcacctcggtactggataagatcgtcccctggtactaccagcgtctgaacgaaaccaccggcagcgtggaatcggctacctgttgctccgactcggcgccagagcaccggatgttcgccaagcttatcgccgattcactggcggtatggaccaccgattataagatcgatggcttccgcttcgacctgatgggctaccacccgaaagcgcagatcctctcggcctgggaacgcattaaagcgctgaacccggatatctacttctttggcgaaggctgggattccaaccagagcgatcgctttgaaattgcctcgcaaatcaatctcaaaggcaccgggatcggcacgttctccgatcgtctgcgcgacgccgtgcgcggcggcgggccgttcgactccggtgacgcattacgccagaaccagggcgtgggcagcggggccggcgttctgccgaatgagctgaccaccctgaccgacgatcaggcgcgtcacctcgccgatctgacccgtctcggcatggccggtaaccttgcggactttgtgctgatcgacaaagacggcgcggtgaagagaggcagcgagattgactataacggcgcgccaggcggctatgcggctgatccgacggaagtcgtgaactatgtgtcaaaacacgataaccagacgctgtgggacatgatcagctataaagccgctcaggaggcggatctcgatacccgcgtccggatgcaggcggtgtcgctggcgacggtgatgctcggccaggggatcgcctttgaccagcagggctcggagctgctgcgctctaaatcctttacccgcgattcgtatgattccggcgactggtttaaccgcgtggactactccctgcaggacaacaactacaacgtcggtatgccgcgcagcagcgatgatggcagcaactatgacattatcgcccgggtgaaagacgcggtggctactccgggtgaaacggagctcaagcagatgaccgcgttttatcaggagctgaccgcgctgcgtaaatcgtctccgctgtttaccctcggtgacggcgcgacggtgatgaagcgcgtggacttccgcaacaccggcgccgatcagcagacgggtctgctggtgatgaccatcgatgatgggatgcaggctggcgccagtctggacagccgtgtcgacggcatcgtggtggcgatcaacgccgcaccggaaagccggacgctgcaggacttcgccggcacatcgctccagctgagcgccatccagcaggcggcaggcgaccgttcgctggcgagcggcgtgcaggttgccgctgacggctcggtcacgctgccggcctggtcggttgccgttctcgagttgccgcagggcgagtcgcagggcgctggcctgccggtgagcagtaaataacataacgtggggcgcccgtaagggcgcctctggctgatgacaaacctgtttcgttattgtgctcgcctttctgtcgggtggcggcttacgccttacccggcctacgaaagactgcaatatcaaacagttatgcatttatctgtcggcccgcactagcgtagcgccgccgggcaatctctgaagaatgcactttgtcagcagtctggggcgcccgtaagggcgccttctctgcaccgtgagggaacaggagacggttgtgattgttcgtgatgatagtgaaagaggcatcccgccgctggtggcgcatcagccgccgtccgcgcaggcagacgcgccggtgagtcgcggtcggatggtgcagatccccggctggattatcccgctgtacgccggattatttatcgcgctcggctggtttggcggcgagcagtggcgccatccgtcaccgccgcaaacgctgcctctgccggtggctcatgcggcgcttttgccgttaaccgccgccggggagaccgcgccaaagacgccgccgccggcggcaaaagccagcgcgcccgcggcgccggaagtggacagcgatacgctgccgcctctacgctacagcgcccatgtctatgcctcgctaccggaaaagcgcagcattgtgttaaacggcaaagcgtggacggagggcgattcacccctgcccaatctggtggtggagcagatccagcaggatgtgacgatcttcagcttcaacggcacgacctttaccctcgcggcgctggaggactggccgggcggaaaaattgacgaggagccgaaagaggaataaaagcgcgcacaataaccggcgcgctgaggatatttcgcttagtcgctgcgcaagctggcaataaatggcgcgagctgacgattaaattgactgcactgtgtggcttccggggtactgtcctgtaatagctgttggtaaagccggtcgctattttggcttaacgtcgccacgtcaatatttccccatccgcgcgctttaccgatattcaccgctgcccgatatatcgtttcatcagcggggagatcgctacgattacatttattcttgagatagcgcgtcccggccgccacggacgagagctgctcgagctgcgcctggctgctgatggccgggctgagcgttgaggcaggtttttgttggcagccagagagaagggctaccatgcaaagcggaaatataagcggaatacgcatcatagagtaatcaaaataatgaatcactggccgctagtttaacaaatatttccctggtgtcatcataaaatattattctgcataaatgttaacaggctctcatttttatcaacggaaaggcgcttaatcgactttacttttatcaataataaacgttggcgctgggaaaatatannnnnnnnnnnnnnnnnnnnnnnnnnnnnnnnnnnnnnnnnnnnnnnnnnnnnnnnnnnnnnnnnnnnnnnnnnnnnnnnnnnnnnnnnnncgtgcgcaggaggtaaaatgctggttaagaatgtcgcattttagtgctatcctgtatgccctgaacattacgtgctatgttctgacttattctgccgatgatgcgtttaacacaatgattttatggtgaatttttattgttagtatcatgtaacatgaagcaaaccaaccctctgaaaggctggcggcgcgtcctgcctgccagcaggttgtcgtccgaaggataagcagcctggacgttaatttgagagatttcttcttcctctgaacaggggaagtattgagaatcaggcctttgcgcctgaacgttgcggagaaaaagcatggcgggagatgaccgcgagcctatcggacgtaagggaagaccctcacgtccgactaaacagaaagtcacccgtcgccgggtccgggaagaggactacgacgatgagtatgatgacgatgattatgaggatgagaaaccggtgccgagaaaagccaaaggcaaaggtggcaagcctcgtcggaagcgcagctggctgtggctgctggtcaagctggggattgtcttcgcggtgctgattgccgcctatggcgtctacctcgaccagaaaatccgcagccgcattgacggtaaagtctgggagctgccggccgcggtctatggccggatggtcaaccttgagccggacatgcagatcagcaaaaacgagatggtgcgtctgctcaacgccacgcagtatcgccaggtcagcgcgatgacgcgccccggcgaatataccgtgcaggctaacagcatcgagatgatccgtcgtccgttcgatttcccggacagtaaggaagggcaggtgcgcgcgcgtcttactttcgacggcgaccatcttgagaccatcgagaatatggataataaccgccagttcggtttcttccgcctcgatccgcgtcttatcaccatgctgcagtcgccgaacggcgagcagcgcctgttcgtgaagcgcagcggcttccccgatctgctggtggataccctgctggcgaccgaagaccgccacttctatgagcacgatgggatcagtctctactccatcggccgcgcggtgctggcgaacctgacggcaggccgaacggtgcagggggcgagtaccctgacccaacagctggtgaaaaacctgttcctctccagcgaacgctcctactggcgtaaagccaacgaagcgtatatggcgctgatcgtcgacgcccgctacagcaaggatcgcatccttgagctgtatatgaacgaggtgtacctcggccagagcggcgataacgaaattcgcggcttcccgctggccagcctgtattacttcggccgtccggtggaagagctgagcctcgaccagcaggcgctgctggtggggatggtgaaaggggcgtcggtctataacccgtggcgtaacccgaaactggcccttgaacgacgcaatctggtgctgcgtctgctgcagcagcagcaagttatcgaccaggagctgtacgacatgctcagcgcccgtccgctgggcgtgcagccgcgcggcggagtgatttcaccgcagccggcgtttatgcagatggttcgtcaggaactgcaggcgaagctgggcgataaagtgaaagatctctccggcgtgaagatcttcaccactttcgactcggtggcgcaggatgcggcggaaaaagcggcctccgaagggatcccggttctgaagaaacagcgtaagctggcagacctggaaaccgccatggtggtggttgaccgcttcaccggcgaagtgcgggcgatggtcggcggcgcggagccgcagttcgccggttataaccgcgcgatgcaggcccgccgatcgattggttctctggccaagccggcgacctatctgaccgcgctgagccagccgaatcagtatcgcctgaatacctggatcgccgatgcgccggtgacgattcgcctgtccaacggtcagacgtggtccccgcagaacgacgatcgtcgtttcagcggtcaggtgatgctggtcgatgccctgactcgctcgatgaacgtcccgacggttaacctcgggatggcgctgggcttgccggcggtagtcgatacctggactaaactgggggcgccgaagaatcagctcaacgcggtgccgtcgatgctgcttggcgcgctgaacctgacgccgattgaagtggctcaggccttccagaccatcgccagcggtgggaaccgtgcgccgctttccgcgctgcggtcagtgattgccgaagatggcactgtgctctaccagagctatccgcaggcggagcgcgcggtgcctgcccaggcggcctacatgacgctgtggactatgcagcaggtggtgcagcgcggtacggggcgtcagctgggggcgaagtatccgggcctgcatctggcggggaaaaccgggaccaccaacaataacgtcgatacctggttcgccggcatcgacggtagtcaggtgaccatcacctgggtggggcgcgacaataaccagccgaccaaactgtacggtgccagcggcgcgatgtcgatttaccagcgctatctggcgaaccagacgccaacgccgctggtgctgacggtgccggaagacgtggttgatatgggcgtggacagcaacggcaacttcgtctgcagcggtggtatgcgttcgctgccggtctggaccacgcagccggatgcgctgtgccgtcagggcgaaatgatgcaacagcagcagttgcagcaacaggaagcgaaaaatccgtttaatcagtccgggcagcagcaacagcagcaacagcagcaacagcagcaacagcagcaacagcaacagcagcaacagccgccgaagcagcaggaaaagagcgacggcgtcgcgggctggatcaaggatatgttcggcagtaactgattttgaccgcacgaccagaccccttaatacgaaagtattaaggggtttttttatgcctgtaaaaaagttaacggctctttaactccataataactatctggttattaattcagccttcgaccggcggcgacaggcatatcgcttgccttgccttcgacgtttcgcctattatatcgcccgtcataataataattctcgtttacgttatcattcactttcatcagagatatacccatggcgcgtccaaaaactgctcagccaaatcactcgctgcgtaaagtcgcagctgtagtagccacggcggttagcggcatgtctgtctacgcacaggcagcagaacaaccgaagcaagaagaaaccatcaccgtcgttgccgccccggccgcccaggaaagcgcctggggaccggcgccgactatcgcggcaaaacgctccgccacggcgaccaaaaccgataccccgattgaaaaaacgccgcagtctgtgtcggtggtgacgcgccaggagatggagatgcgccagccgacgacggtaaaagaggcgctctcctatacgcccagcgtcttctccactcgcggcagttcgaccacctatgacgtggtcaccattcgcggcttcaccacctcgacgaccgtcaacaccaaccagtatctggacggcatgaagctgcaggggaataactactctgaagtctccatggatccttacttcctcgagcgtgtggaagtgatgcgcgggccaacctcggtgctgtacggcaacagcaacccgggcggtatcgtcagcatggtcagcaagcgcccgactaccgagccgctgaaagaagtgcagtttaagatgggcaccgacaatctgtggcagaccgggtttgactttagcgacgccattgatgatgccggcgtttggtcgtatcgcctgaccggccttggccgcagtcaggatgcccagcagcagatggcgaaatcgactcgctacgcggtggcgccctcctttagctggcgtccggacgataaaaccgacttcaccttcctgagcaacttccagaatgacccggatgcgggctactacggctggctgccgcgcgaaggcaccgtggtgccgtattacgacgccaacggtaaggcgcacaagctgccgaccgatttcaacgaaggcgagtccgataataaaatctcccgccgccagaagatggtgggctacagcttctcccatcagttcgatgacacctttaccgtgcggcagaacctgcgctatgccgatgtgcatacgctctatcgttcggtatacggcaacggctatgtcgcgccgggctacatgaatcgcgcctacgtgcgctccgacgagcacctgaacaccttcaccgtcgatacccagctgcagtctgatttcgccaccggcgcggtcagccatacgctgctgaccggcgtggactactcgcggatgcgtaacgatgtggatgccgactacgggacggcggatcctatcagcatgagcaatccgcagtacggcaatccgaatattcaggtcaccttcccgtacgcggtcctcaaccggatggagcagaccggcctgtacgcgcaggatcagatggagtgggataaatgggtgatgaccctgggcggccgttacgattacgccacgacctcaacgttaacccgcgccaccaacagcctggcggagaatcacgaccagcagttcagctggcgcggcggcatcaactacctgttcgataacggcatctctccgtacttcagctacagcgaatcgtttgaaccggtatcgggttccaacagccgcggccagccgttcgatccgtcgcgcggtaagcagtatgaagccggcgtgaaatacgtgccgaaagatatgccggtggtggtcaccgcggcggtctatcagctgaccaaagacaagaacctgacggctgatccggctaaccaggcgttcagcatccagaccggcgagatccgctcccgcggccttgagctggaggcgaaggcggcggtgaacgctaatattaacgtcaccgcagcctacagctacaccgatgcggagtacactcacgatacggtgttcaacggcaaacgtccggcggaagtgccgcgtaacatggcctccctgtgggcggattataccttccacgaaaccgcgctgagtggtctgacgattggggccggggcgcgctatatcggttcaacggtcagctactacaaaaatgacaccagcaccggtaagaaaaatgatgcctttagtgtggccggttatgcgctgatggatgcgacggtgaaatacgatctggcgcgctttggcctgccgggatcgtcggtcggcgtcaacgtcaacaacctgttcgaccgcgaatatgtctccagttgctacagcgaatacgcctgctactggggcgccggacgtcaggtcgtcgccaccgccaccttccgtttctaaccacctacgggcgcggttcgccgcgccctctatcaggttatcgctatgcaggaacagactccgcacgcagaaaccaccttcgcgctggatcgcgtcactttccgtgtgcctggccgcacattgctccatccgctctcgctcaccttcccgtccgggaaagtcacaggcctgatcggccataatggctccggcaaatcgacgttactgaaaatgcttggccgtcatcagccgccctccgcaggcgaagtgctgctggacgggcagccgctggagagctggggcagcaaagcctttgcccgcaaagtggcctatctgccgcagcagctgccgccggccgaaggtatgacggtgcgcgagctggtggcgatcggccgctatccatggcacggcgcgctgggtcgctttggcgcagcggaccgtgagaaagtagaagaggcgattgcgctggtggggctgaagccgctcgctcatcgtctggtggacagcctctccggcggtgaacgccagcgggcgtggatcgccatgctggtggcgcaggacagtcgctgcctgctgctcgatgaacccacctcggcgctggatattgctcatcaagtcgatgttctggcgctggtgcatcgtctcagccagcagcgcggcctgacggtgatcgccgtcctgcacgatattaatatggcggcccgctattgcgactatctggtggccctgcgcggcggagaaatgattgctcaggggacgccggcggaactgatgcgcagcgacactctggaacagatctatggcatcccgatggggatcctgccacacccggccggtgcggcgccggtaagctttgtctattgatgatgaacccaactctgataacccgacgccgcctgctgatcgcgatggcgctctcgccgctgctgtggcagatgcgcggcgcgcaggcggccgacgtcgacccgcagcgcgtggtcgccctggagtggctgcccgcggagctgctgctggcgctcggcgtgacgccctatggcgtggccgatattcccaactatcgcttgtgggtgaacgaacccgcgctgcccgactcggtgatcgatgttggtctgcgtaccgaacccaaccttgaactgctgacgcagatgaaaccgtcgtttatcgtctggtcggcgggctacggcccgtcgccggagaagctggcgcgtatcgcgcccggccgcggtttcaccttcagcgacggcaaacggccgctggcgatggcccagcgttcgctactggaaatggccgatctgctgggcaaaacgcagcaggcgaagcgccatctggcggagttcgacgcgctgatggagagcctgcgtccgcgttttgccgggcgcggcgatcgtccgctgctgatgatctctctgctcgatccccggcacgtgctggtgtttggcgaaaactgcctgttccaggaggtgcttgatcgctttggtattaaaaacgcctggcacggcgaagcggcattctggggaagcgttagcgttggcatcgacaggctggcggcatttaacgaagccgatgtcatctgtttcgaccatggcaatgagcgagatatggctcaactgctggcgacgccgctatggcaggcgatgcccttcgtgcgcgcgggccgcttccagcgcgttccggcggtctggttctacggcgcgacgctgtcagcgatgcattttgcccgcgtgctggctgatgcccaggggagtccggcatgaatacgcgtctctcgccgttagctattatcctgctggccgggctgctgggcgtcgccttcgcgctgagcatcgtcaacctcaatgtcgccttgccctatgcgcagtggcggcaggcgctgtggcagccggatgtcgatgatatcgcccaaatgctgtttcattacagtttgttaccgaggctggctgttgcgctgctggtgggcgccgggctgggactggttggcgtcctgttccagcaggtgctgcgtaatccgctggcggaaccgaccacccttggcgtcgccaccggcgcgcagctggggataacggtcaccacgttatgggctattcccggcgtgctggcgtcgcaattcgccgcgctggccggggcctgtctggtgggcgcgctggtgtttggcgtctcgtggggcaagcgcctgtcgccggtaacgctgatcctggcggggctggtggtcagcctttactgtggcgcgcttaaccagctgatggtgattttccatcacgaccagctgcaaagcatgttcctgtggagcaccgggacgctgacgcagaccgactggagcgtggcgcagcgcctgtggccgcagctgcttggcggggcaatactcaccttgctgctgctgcggccgctgaccctgatggggctcgatgacggggtggcgcgtaacctcgggctggcgctgtccctggcgcgcctcggcgccctgacgctggcgatcgtcatcagcgcgctgctggtgaacgcggtagggattatcggctttatcggcctgttcgcgccgctgctggcgaaaatgcttggcgcccgtcggctgctggcgcggctgctgctggcggcgctgatcggcgcgctgctcctgtggctttccgatcaggtgatcctctggctgagccgggtatggcgggaagtctccaccggctcggtcaccgccctgattggcgcgccgctgctgctgtggctgctgccgcggttgcgcagcatcagcgccccggtgatgaacggcggcgataatgtgcagcctgagcgctatcatgtgcaatggtttgttctcgcaggcgtcgcgttgctgctgctggcggtgagcgtggtgctggcctttggtcgcgatgcccacggctggctgtgggcccacggcgatctgctggagcaactgctgccctggcgctggccgcgggtgctgtcggcgctgttcgccggggtcatgctggcggtcgccggctgtattatccagcgcctgaccggcaacccgatggccagcccggaagtgctgggcatcagctccggcgcggcttttggcgtggtgctgatgctgttcttcgtgcctggcgacgcctttggctggctgctgccggccggcagccttggcgcggcggccaccttgctgatcattatgctcgccgccgggcgcggcggcttctcgccgcatcggatgctgctggcggggatggcgctgagcaccgccttcactatgctgctgatgatgctgcaggccagcggcgatccgcgtatggcgcagatcctgacgtggatctcggggtcgacatatagcgcgacgccggagagggtagtgcgtagcggcgcggtaatgctggcgctgctggcgctggcgccgctctgtcgtcgctggttaaccatcctgccgctgggcggggaggcggcgcgagcggtgggcatggcgctgacgtcatcgcggattgttctgctgctgctggcggcctgcctgacggcggcggcgacgctgaccatcggcccgctgagctttgtcgggctgatggcgccgcatatcgcgcggatgatgggcttccggcgaaccctaccgcatatggtgatttcagggctgactggcgggctgctgctggtcttcgccgactggtgcggacggatgatgatgttcccgtatcagatcccggcggggctactgtcgacctttatcggcgcgccttactttatttatttgctgagaaagcagagtcgctaacggtcctggatggcttcaacatccccggtggcgctatcgcttaccggggctacagcgctgtgcgatttggtagcccggataaggcgcaatgcgcctcctccgggaaaatccctgcgccaccaggcattcaagcaccttacagcttggcaaatacccggcgcgcggcgtcgatggtgttgtcgatatcttcttcgctgtgggccacggacataaagccggcctcaaacgctgacggcgccaggtacacgccttcctccagcatcagatggaagaagcgcttgaagcgttcaacgtcgcacttcaccacgtcctgatagcaggtgacggtttcggcatcggtaaagaagatgccgaacatgccgccgacgttattgaccaccagcgggatcccggcgtcacgtgccgcatccagcaggccttgcgccagctggttagtcagttcagtcagggtttcatggacccccggctgcgccacttcgttcaggcaggcgaagccagccgccatggcgatcgggttgccggagagggtgcccgcctgatagaccggaccggtgggcgccagagcgtccatcacctcacggcggccgccgaaggcgcctaccggcatcccgccgccgatgattttccccagacaggtcagatccggctccacgccgtagtaagcctgagcgcctgccagcgccacgcggaagccggtcatcacttcgtcgataatcagcagggcgccaaattcgtcgcacagcgcgcgcaggcccggcaggaattccggctgcggcggaatgcagttcatatttccggccaccggctcgacgatgatgcaggcgatctcctgcggatactgctcgaacgccgcgcgcaccgaggcgaggtcgttataagtgcaggtcagggtatgtttggcgaaatcggccgggacgcccggcgagttcggctggccgagggtcaacgcgccggaaccggctttcaccagcaggcagtcggcatggccgtggtagcagccttcgaacttaatgattttgtcgcgaccggtgaagccgcgcgccaggcgaatggcgctcatggtggcttcggtaccggagttcaccatccgcaccatatccatggtcggcaccagctcggtcaccagggccgccattttcacttccatttcggtcggcgcgccaaagctcaggccgcgggttgccgcctcgatcaccgcattgcggatagccgggtggttgtggcccagcaccatcggaccccaggaaccgacataatcgatataggctttcccatccacgtcatagaggtaagcgccatccgcgcgttcgataaacagcggtgtgccgccgacgccggtgaaagcgcgcaccggcgagttaacgccgccggggatcagttcgcgcgcagcgtgatacagattttcagatttgctcatggccagggtcctggttcgtgaaaaatgttttatcggctattctaagttattccaggatggttatgaaagttttgcccaattgaaacaatgtgccgcaagggcatttttttgacgacgcagcgcgccgggacggctaaaatgccgctctcttcatttgtattaccaataattgataacggcatgaaagcagaaactccctcttttgaagcacatcagtttgtgcgggtgcgtcgcggcgatgcggtgcgccgtctgattcaacgcgataaaacgccgctggcggtgctgtttatggcggcagtggtcggcacgctggcggggctggtgggcgtcgcctttgaaaagagcgtgaactgggtgcagaaccagcggatcggcgcgctggcgcaggtggcggaccactggtatctggtctggccgctggcgtttatcctgtcggcgctgctggcgatggtcggctattttctggtgcgtcgctttgcgccggaggccggcggctccgggattccggaaattgagggcgcgctggaggagctgcggccggtgcgctggtggcgcgtgctgccggtgaaattcgttggcggcatggggacccttggcgccgggatggtgctgggtcgtgaaggaccgatggtacagcttggcggcaacattgggcgcatggtgctggacgttttccgcatgcgcagtccggaagcgcggcatacgctgttggcgaccggtgcggcgtcggggctttcggcggcctttaatgcgccgctggccggtattctgtttatcatcgaagagatgcgcccgcagttccgctacaacctgatctccattaaagcggtgtttaccggcgtgatcatgtcgagcattgtgtttcgcattttcaacggcgaagcggcgatcattgaggtgggtaaactaagcaacgccccggtaaataccctatggctgtatctggtgctgggcatgctgtttggctgctttggcccgctgtttaattttctggtgctgcgcactcaggatctgttccagcgcatccacggcggcaacatcaaaaaatgggtgttgattggcggattaatcggcgggctctgcggtctgctggggctgatgcagccctccgcggtgggcggtggctttaacttgatccctatcgccgctgccggtaacttctccgtcggactgctgctgtttatctttattgcccgcgtggtgaccacgctgatctgcttctcttccggcgcgccagggggcattttcgcgcctatgttggcgctcggcacgctgctgggcacggcgttcggcatggcggctattccgctgtttccggcctaccatctcgatgcgggcaccttcgcgattgccggcatgggggcgctgctcgccgcctcggtgcgtgcgccgctgaccgggatcgtgctggtgcttgagatgaccgataactatcagctcattttgccaatgattattacctgccttggcgcaacactactggcgcaattcctcggcggtaagcctttgtattcgaccattctgcagcgtactctggcgaagcaggaagccgagcaggcggcaaaagcgcagcaggctccccgggagaatacttgaacgatttaccagggtattagataatggctcaaaaggtccggttattctttaaccggccggaagtatcaatgggagcagaaaatgagtgatgacgtagcgttgccgctggagtttaccgaagccgcagccaataaagtaaaacacctgattgcggatgaagataatccgaacctgaaactgcgcgtgtatatcaccggcggcggttgcagcggtttccagtatggcttcacctttgacgatcaggtgaacgaaggggatatgaccattgagaaacagggcgtcggcctggtggttgacccgatgagcctgcagtatctggtcggtggctctgtcgactataccgaagggctggaaggttcgcgctttatcgtgaccaatccgaacgcgaaaagcacctgcggctgcggctcctcgttcagcgtttaaagcgagttctcccccagcgggagggagcaaaccctaaaaacggtaaccttaaggttaccgttttgcttttattaccgaccgttatcgtccagggcaaacgtcggcagcttcagatgccagcgaatagccgccagacgaattaccagggtgaccaccatccccatcattgccgaattctccagcgggagatgaaaggtgtcgtgtgccgtggcgtggacaataccgccgacgatacaggcggtggcgtagatttcggtacgcagaatcataggaatttcccgcgccagcacgtcgcgaataatcccgccgccgacgccggtcaccacccccatgcacaccgcgaccagcgggccgctgccagcgagaaaagctttattgacgccaatgccgacaaacaccgccagaccgacggcatcaagaacgggcaggatccatttcggcagccggcgaggctggcggaccagcaggatggtcagcatgctggtgaccatcgccaccaccagatcggtgggatctttgacccagaataccgggccattcgccagcgccatgtcgcggatggtcccgccgcctaccgccgtcactacccctaacaccagcacgccgaatgggtccatacgcagttttccggccagcagtacgccggagatcgcgaagacagctgtgccaataatatccagccaatagacaagcatcgttgattcccactgaacatccggtgtgccggatgattattttacctggtcaagcgccgcacaaagttgtttggcggcgaggataatacgtgggccggcgcgttcaaaccagtcgctgtgtaacgcaatcaacgaaatggtgagctgatgttgccaaaagcgctgcgcttcggcaatgcggctggcatccccggtgaccacgatcgcctgcggctggcgggccagcacctgttcgcggctcacctgcggccagggaacgcggctggtggcgaagatattctcgccgccgcaaagccttagcacctgatcctgaatcgaaccggggccgctggtgaacagcggtgcggagccgaactgcaggaagacgcgtttcttcggcgcgttggcatagcgcgctttcaacgcatcgtattcctgctgcatcgcctgcgccgcctgctgtgctttttccggctgcgggctccactgcgccagctcacgcagggtagcgatgatctcttctatggtcgaggtctgtacccacaggacgtgaatacccagagactgcagctggttaacctggcgttcggcattgcccccgcgccaggccagcaccacgtctggcttgagcgccacgatgcgttccaggttcattccctgccagctggcaacctgttcgatcgttttggcctgcgaaggataatcggaatagctgctgacgccgaccggcgtgatcccggcggcaaaggccagttcggtattggcgggggagagggtgatcacccgcggcgcggccagcagccacgccggggcgagtaacagcagcgcggcaagcgcgaaggatagcgacttagccacgtgccaggttctgtaccagattctccaccatcagggtggactgtctggcggcgaccgcaaggaactcctcaaagctgaggtgggactgctggtcggccacgtcggaaatagcgcgaaccaccacgaagggaaccttaaagttatggcagacgtgggcgatggcggtcgcttccatttccacggcgatcgcctgcgggaaattatggcggatcttcgccagaccgacagagccgttaatgaaggcatccccgctaacgataaggccgcgaacggcgttgagatctaacgctttaatgcagctctctgcggcggccaccagtttttcatccgccttaaaacccgccgggcagccagggagctggccgtattcatagccgaaggcggtgacgtcggcgtcgtggtagcgcgcttcatcggagacgacgatatcgccgaccttcagcgtcgacgccaggccgccggcagaaccggtattaatgatcacgtcaggctggcagcgctccagcagcagggtcgcgcccatcgccgccgctacttttccgataccagacttcagcagagcgacgtcaacgccgtgaagttggccggtatagatttcgcttccgccaatggtgatggtctggcggttttcgattttgtcgcgcagaagggtaacttcctcttccatagcgccaataatgccaattttcatagatttactcgcgatgtgtcaggtttagttgcatagtctatcatgcgcttaaggggaagcgtattgctcgcgcgggagaggctatggcaaagattgattttcgcaacaagataaactggcgtcgacgcttccgttcgccgccgcgggtggagacggagcgcgacatcctgcggatctttgaaagcgatcggggacggatcgtcaactcgccggcaatccgccgcctgcagcaaaaaactcaggtcttcccgctcgagcgcaacgcggcggtgcgcactcgcctgacccactcgctggaggtgcagcaggtggggcgctatatcgccaaagaggtgctgagccggctgaaagagctgaggctgctggaagagtatggcctggaagagctgaccgggccattcgagagcgtggtggagatggcctgcctgatgcacgatatcggcaatcccccgtttggccattttggcgaagcggcgattaacgactggttccgtcagcgcctggcgcccggcgatgcgctcgggcagccgctgaccgacgatcgctgcgaagtgcaggccttacgcctgcatgacggagagacatcgcttaatgcgctgcgccgtaaagtgcgccaggatctctgcagctttgagggcaacgcgcagggcattcgtctggtccatacgctaatgcgtatgaacctgacctgggcgcaggtgggatgtatcctgaaatatactcgtccggcgtggtggtctgaggagacgccggccagccacagttatttaatgaagaaacctggctattatttagccgaagaagagtatgtcgcgcgtttgcgtaaagaactggatctcgcgccttacaatcggtttccattaacctggattatggaggctgcggatgacatctcatattgcgtcgcggatctcgaggacgcggtggaaaaacgtatttttagcgcagaacagctctatcagcatctttacgacgcctggggcagtcatgaaaaaggctcgttattttcgcaggtagtagaaaatgcctgggagaaatcgcgagctaattatctgaagcagagcgcggaagatcagttttttatgtatttgcgggtgaatacgctgaataagctggtgccctacgcggcgcgccgatttattgacaacctgccggcaatcttcacgggggactttaatcatgcgttgctggaggacgacagcgattgcagtcagctactggagctctataaaaatgtggcgatgaaacaggtctttagccatccggatgttgagcagctggaattgcagggctaccgggtgatcagcggcctgttggatatctatcagccgctgctgaaattatcgctggaggatttcagcgaattagtagcgcaggagcgggtacgacgtttacccattgcctcccggctgtatcagaaactttcgacccgtcaccggctggcctatgttgaagcggtaaataaactggcgcgtacggcgcccgaatttgcgctgatggaatactattatcgctgccgtctgattcaggactatatcagcgggatgacggatttgtatgcgtgggatgaatatcggcgtctcatggcggtggaataggctggagttttgtaaagatggacaataaatttttactttttccagaaacttaattccggaacttagcgttataaaatgactctgatagtcacgtacacagcaactttcgttacctgatattgagattgaaactgatgaaaaaaaccacgttagcaatgagtgcactggctctgagtttaggtctggcgttgtccccgctctctgcgagcgcggcagaaacggcatcttcggccactaatgcacagcagatgccaagcctggccccgatgctggagaaggtgatgccgtcggtggtgagcattaacgttgaaggtagcaccaccgttaatactccacggatgccacgcaacttccagcagttctttggcgataattcgccgttctgccaggatggttctcctttccagagttcgccgttttgccagggcggcggacagggcggtcagcctgacggcggccagcagcagaaatttatggcgctgggctccggcgtcatcattgatgccgccaaagggtatgtggtgaccaacaaccacgtcgtggacaacgccaccacgattaaggttcagctgagcgatggccgtaagtttgatgccaaagtcgtcggcaaagatccgcgctctgatatcgcgctgattcagattcaggagccaaaaaacctgacggcgattaagcttgccgactccgatgcgctgcgcgtcggtgattacaccgtggctatcggcaacccgttcggtctgggcgaaaccgtgacctccgggattgtctccgcgttgggccgtagcggcctcaacgtggaaaactacgaaaactttatccagaccgatgcggcgattaaccgcgggaactccggcggcgcgctggtgaacctcaacggcgagctgatcggtatcaacaccgccattctggcgccggacggcggcaacatcggtatcggttttgctatcccgagcaacatggtgaaaaacctgaccgagcagatggtgaaatatggccaggtgaaacgcggtgagctcggcattatgggcaccgaactgaactctgagctggcgaaagcgatgaaagtcgatgcccagcgcggggccttcgtcagccaggtaatgccaggttcggcggccgcgaaagcgggcattaaagccggcgatgtcatcacctccctcaacgggaaagcgatcagcagcttcgccgcgttgcgtgcccaggtcggcaccatgcctatcggcagcaaagttgagcttggtctgctgcgcgacggcaaaccggtgaccgtgaccgtcgaactgcagcagagcaaccagacccaggttgactccagcaccatcttcaacgggattgaaggggcggaaatgagcaataagggtcaggataagggcgtggtggtcaataatgtgaaagccggtaccccggcggcacagattggcctcaagaaaggcgacgtcatcgtcggggcgaatcagcagccggtgaaaaacatcgccgatctgcggaaaatcttcgacgccaaaccgtccgtactggcgctgaacattcagcgcggcgacgcctctatctatctgctgttgcagtaaccgccagcgctcgcttcccagccccttccctcgccgagggcaggggcttttttcgttctgtgaccgcccccacaactccacatatctcaccccggcttagtgcaaatgcacaatgcagcgcgacgatgactcttttatgctggtgcccagcaaaggggaggactacatggctggctggcatcttgataccaaaatggcgcaggatattgtggcgcggaccatgcgcatcatcgataccaatatcaacgtgatggatgcccgcgggcggatcatcggcagcggcgatcgggaaaggattggtgaattgcacgaaggcgcgctgctggtcctctcccaggggcgggtggtggatatcgacgacgcggtcgctcgccatctgcacggggttcgccaggggattaacctgccgctgcgcctggagggggagatcgtcggggtgatcggcctgaccggcgagccggagtcgctgcgaaaatatggcgagctggtgtgcatgacagcagagatgatgctggagcagtcgcggctgatgcatctcctggcccaggacagccgtctgcgcgaagagctggtgatgaacctgattcaggcggaagagcataccccggcgctgaacgaatgggctcagcgtttaggcatcgatctcaatcagccgcgcgtggtggcgatgattgaggtagacagcggtcagctcggcgtggacagcgcgatggcggaactgcaacagttacagaacgcgctgaccacccccgatcgcaataatctggtggccattgtctcgctcacggaaatggtggtgctgaaaccggcgctgaacagctttggccgctgggacgctgacgatcacgtccggcgcgtcgagcagcttatcgccaggatgaaagagaatggccagctgcgctttcgcgtggcgctgggcaacttcttcaccggcccaggaagtatcgcccgctcttaccgtaccgcacggacgacaatgatggttggcaagcagcggatgccggagagccgcagttatttctatcaggatctgatgctgccggtgctgctcgacagcctgcgcggcggctggcaggccaatgagctggcccgtccgctggcgcgtttgaaggccatggacaacaacgggctgctgcggcggacgctgcaggcgtggtttcgccataacgtgcagccgctggcgacgtcaaaggcgctgtttattcatcgcaatacgctggagtaccggttgaaccgtatctcggagctgaccggcctggatctcggtagctttgacgacaggctgctgctgtatatcgcgctgcagctggacgaacaacgctaagacgtggaggcaaaaaaatgccgggtagcgacgcgccatacccggcctggacgatgcatgctgtctggagtggatagagaccaccagcccggccaggcaacgcgccgccgggatgctcttacttacgggtgagcttttccagatcggcttcgatttcgctgatcttattggtgaccacgctttccagatggcgtaaatcgtcgaggattttacgcttgagatcgatttcagtgcgatcgcgctggcagatctgatccagctcgtcgataacgtagcgcagattggggctgatctcctggacctctttgtagccctggccgacgccgtcggcgacgacggttttgcgctgacgcggatatttgaacttcacgctcttggcgaagaattcgcctttgtctttctgaaaatagattttcagaatgtcgttgttagcttcctgccgcaggctatagcgatcgatctcatcagggttggtaatgccaagacttttcagattatcgtacataacggtacctttgatagcatcataaccattgaataattaacgaaaaaatccattttcgccagcatcaaatataaaaaaagcgggatatctcccgctttttatttgctttagtcgatggtgcgcagcagctcgttaatgccgaccttgccgcgggttttggcatcgactttcttcacaatcaccgcgcagtacaggctgtatttaccatctttcgacggcaggttgcctgagaccaccaccgagccagccggtacgcggccgtagaagacttcgccggtttcgcgatcgtagattttggtgctctgaccgaggtaaacgcccatggagatgacggagccttcttcgacaatcaccccttcaaccacttcagagcgcgcgccgatgaagcagttatcttcgatgatggtcgggttcgcctgcagcggctccagtacgccaccgataccgacaccgccggacagatgcacgtttttaccgatctgcgcgcaggagccgacggtggcccaggtatcaaccatggtgccttcgtcaacgtaggcgccgatgttaacgtaggacggcatcagcacagtgttgcgggcgatgaacgcgccctggcgcacggcggccggcggcaccacgcggaaaccttctttctggaaacgcgcttcgtcgtagtcagcgaatttcatcggcactttatcgaagtagcggctttccgcaccatcgataacctggttatcgttaatacggaaagagagcagtaccgccttcttcagccactgatgcgtcacccactgaccgtcgatcttctcagcgacgcgcagcgcgccggaatcaagaagggcgataacctggttaaccgcttcgcgggtcacggtatccacattagccggcgtaatgtcggcgcgacgctcgaaagcggactcaataacgttctgtaactgctgcattgtttctttccatttactaaaaaaaatacgtcaccctttatcgtttggattgagggccgctgtcaaccgttgttgcacttcttgttgcagctcattattaagggcacgccggtcggcggtggcgattataaataaatcttctactcgctcaccaattgtcgtaattcgcgccccgtgaagcgatatcccgaggtcggcgaacacctgcccgacgcgggcgagcagcccgggctggtcgagcgctatcagctccagaaacgattttcggtcggtatgggtcggcaggaaattcacctcggtgtccacggaaaaatggcgtagctttgccgcctgacgacgcggggccggaggctgccagctgcgctgagtgatggtctgctccagcccctggcggatcgcctcgtggcggtcggcggaaagggggctgccgtcgggctcaaggacgataaaggtatccatcgccataccgtcgcgggtggtgaagatctgcgcgtcgtggacgctgaggttgcgacggtcaagttcgccacacaccgcggcgaacaggtaagggcgatccgggctccagataaaaatctccgtaccgccgcgggtggcctgcgagctcagcaggatcatcggcttattcagatcgtggcgcagcaggttgcgggcgtgccaggcgagctgcgtcggcgtatgtcgcacgaaatagttggcgcggcagcggttccagatctgatgcagcgcctcttcattaatattgtccatccgcagcagggccagcgcctgcagctgatggtgacgcactcgttcgcgcatgtccggggtgctttgcatgccgcgacgcagctgcttctcggtggcgaaatagagttcacgcagtaggctctgcttccagctgttccataaggtttcgttggtggcgcagatatcggcgacggtcagacacaccagatagcgcagacgattttccgtttgcacctcctcggcgaactgcttaatcacctccggatcctgaatatcgcgccgctgggcggtgactgacatcagcaggtggtgacgcaccagccaggcgaccagctgcgtttcgcgcgagttcagcccgtgcagctcggcaaacttcagcacatcctgcgcgccgaggatcgagtggtcgccgccgcgccctttggcgatgtcgtggaacagggcagcaattaagatcagctccgggtgcgttaagcgcggccacagctccacgcacagcgggtggcggctgcgggtttcttctttggcaaagctttccagcttgagcatcacccggacggtgtgttcatcgacggtgtaggcgtgaaacaggtcgaactgcatctggccgacgatatgcgaccactgcggcatataggcccacagtacgctgtggcgatgcatcggcagcagcccgcgacttaccgccccctgatggcgcagcatactaagaaagagcgtgcgcgcctccgggatatagcacagcggctgggtgagatgacggcgggcgtggcgcagatggcgcaacgtcgttgagtagatgccggtgatggtgctattgcgcaccatgatataaaacatgcgcagaatggcctgcggttcgcgaataaacagcgtgtcgtcacgcagatcgataagggtgccgcgcagctggaaatcatcatcgatcgggcgtggtttttcatcctcggtcagggcgaggatagcctcctcaaacagctgaagcagcatctgattcagctcgctcacccggcgggtaacgcggaagaagtccttcatcatatgctcaatcggctggttgccgtcgccttcatagcctagccggcgggccacgctgagctggcggtcgaaaagcagacggttgtcatagcgcgtgagttcgagatgcagcgcgaaacggatgcgccacagctgatgcagacactcattgagttcattgcgctcggcttcggtcagaaagccgaagccgaccatctcatccattgaggtggcgccgaaatggcggcgagccacccactgtagcgtatggatatcgcgcaagccgccggggctgcttttcacgtccggctcgaggttatagcttgtgccatgatagcgctgatgacggacgttctgctcttcgaccttggcggcgaagaacttttccgatggccagaagccgtcgctaaaaatatgtttttgcagttcaaggaacagcgcgacgtcgccgatcagcaggcgcgattcgattaagttggtggcaacggtcagatccgagagaccttccagcaggcactcttcgagggtgcgtacgctgtggcccacctccagcttgacgtcccacagcagggtgagcagttcgccgactttttgcgcctggtcgtccggcagttttttacgactgaggatcagcagatcgacgtctgagagcgggtgcagttcgccacggccatagccgccgacggcgaccagcgccaggtcgctgacggattcaaaaccgcaggcgatccataatcgctgcagcaactggtcgataaattcggtgcgcgccgcgatgagctgctccgcgacgatgccggagtcaaacgcctcgcccagccagtgctggaaggtatcgatgtgcgccttgattgcggcacagttcagatcgccctgcggccaactcaccgggtgttccggcgggacgggcaggagaggggaggctgtgtcaggtaatgagttgctcatcgcgtcaccataagaaaaaactatctaataaaaaagccggcgggcgccggcttttcatcattcatcgtgcgagattatcgccgggatggtgtcatccttgcgtagcgtcagaatttcgcagccgttgtctgtcaccacaatagtatgctcgtactgcgcagacaagctccggtctttggttttcaccgtccagccgtctttcatgctgcggatctcttttttaccggcgttgaccatcggctcgatggtgaaggtcatgcctggtttgagtacgacgttggtctccggcgaatcgtagtgcagtacctgaggctcttcatggaagccgcggccgatgccgtggccacagtactcgcgaaccacggagaaaccttcggcttccacaaatttctggatcgccgcgccgatggtgcgcaggttgatgcccggtttaaccatcttcagcgccaggtacaggctttcctgagtgatgcggcacaggcgctcgccgagaatcgtcggtttgccgacgataaacattttggaggtatcgccatggaaatcatctttaatgacggtcacgtcgatattgacgatatcgccatctttcagcagcttgccgtcatcagggataccgtgacagaccacttcattgaccgaaatgcagacggatttcggatagccgtgatagccgaggcaggcggaaatggccttctgctcgttaacgatatagtcgttacagatgcggtccagttcgccggtgctgacgcccggtttgacgtagggttcgatcatttccagcacttcggcggccaggcggccggcaacgcgcattttttcgatgtcttcagatgtcttaatagagatagccatggagtatgtccagcagtgtcgatattttcgacaataatagagtaagtcctgtcaatggtaacagtccgggcaggctggtgccaaactgagaatcattaacagcacgcgacgtcaacaagagttggtgtctggatggattttgtggtataaagcgcgccggacttccgttccatctcagatacacaaggatggacgtaagcgacatagctcactttgtgtaataacacacacgtatcggcacatattccggggtgcccttcggggtcggtaatatgggatacgtggaggcataaccccaatttaatctatagaggttttaaacatggcaactgtttccatgcgcgacatgctcaaggctggtgttcacttcggtcaccagacccgttactggaacccgaaaatgaagcctttcatcttcggcgcgcgtaacaaagttcacatcatcaaccttgagaaaaccgtaccgatgttcaacgaagctctggctgaactgaacaagatcgctgctcgtaaaggtaaaatccttttcgttggtactaagcgcgctgcaagcgaagcggtaaaagacgctgctctgagctgcgatcagttcttcgtgaaccatcgctggctgggcggtatgctgactaactggaaaaccgttcgtcagtccatcaaacgtctgaaagacctggaaactcagtcccaggacggtactttcgacaagctgaccaagaaagaagcgctgatgcgcactcgtgagctggacaagctggaaaacagcctgggcggtatcaaagatatgggcggcctgccggacgcactgttcgttatcgacgctgaccacgagcacatcgctatcaaagaagcaaacaacctgggcatcccggtatttgctatcgttgataccaactctgatccggacggcgtagacttcgttatcccgggtaacgacgatgcaatccgcgcagtaagcctgtacctgggcgctgttgctgctaccgttcgtgaaggtcgctctcaggacctggcttctcaggcggaagaaagcttcgtagaagctgaataataaggtttaagcccttattagtaccgtgtatgaataggggcccattatcggccccttttttcaatttacgctgtttggccgttggccgggcagtatccacatctcccgaggattttagaatggctgaaattaccgcttccctggtaaaagagctgcgcgagcgtactggcgcaggcatgatggattgcaaaaaagcgctgactgaagcgaatggcgacatcgagctggcaatcgaaaacatgcgtaaatccggcgcgatcaaagcggcgaagaaagcaggcaacgtggctgctgacggcgtgatcaaaaccaaaatcgaaggcaactacggttacattctggaagttaactgccagactgacttcgttgctaaagatggtggtttccaggcatttgccgacaaagtactggacgccgctgttgcaggtaaaatctccgacgttgaagttctgaaagcgcagttcgaagaagaacgtgttgcgctggttgctaaaatcggcgagaacatcaacatccgtcgtatcgctgttctggaaggcgacgttctgggcagctaccagcacggtgcgcgtatcggcgttctggttgccgctaaaggcgctgacgaagagctggttaagcagctggcaatgcacgttgctgcaagcaagccggaattcgttaagccggaagacgtgtctgctgaagtggtagagaaagagtaccaggttcagctggacatcgcgatgcagtccggtaagccgaaagaaatcgcagagaaaatggttgaaggccgcatgaagaaattcaccggcgaagtttctctgactggtcagcctttcgttatggagccgagcaaatctgttggccagctgctgaaagagcacaacgctgacgtgactggcttcatccgctttgaagtgggcgaaggcattgagaaagttgagactgactttgcagcagaagttgctgcgatgtccaagcagtcttaatttttaaaaaaaggagccgcctgagggcggcttctttttgcgcccattttgtaaattcagccaactgcttatagtggccgcgctgaaatgcgacatacaatgtcgccggaattatcacatctcattcgttgacagtctcaggaaagaaacatggctaccaatgcaaaacccgtctacaaacgtattctgctgaaattaagtggcgaagcgctgcagggctcagaaggcttcggtattgatgcaagcatacttgaccgcatggctcaggagatcaaagagctggttgagctgggtattcaggttggcgtagtaattggtggcggtaacctgttccgtggtgctggtctggcgaaagcgggtatgaaccgcgttgtgggcgaccacatgggcatgctggcaacggtcatgaacggcctcgcaatgcgtgatgcgctccaccgcgcctatgtgaacgctcgtctgatgtccgccatcccgctgaacggcgtatgcgacaactacagctgggcagaggcgatcagcctgctgcgcaacaaccgcgtagtgatcctctccgctggtaccggcaacccgttctttaccaccgattccgcagcctgcctgcgcggtatcgaaattgaagccgatgtggtgctgaaagccaccaaggttgacggcgtattcaccgctgacccggcaaaagatccttctgccaccatgtacgatcagctgacctacagcgaagttctggaaaaagagctgaaagtcatggatctggcggccttcaccctggcgcgtgaccataaattaccgattcgcgtcttcaacatgaacaaacctggcgccctgcgtcgcgtggtgatgggcgaaaaagaaggcacattgatcacggaataattcccgtcagcgccaaatccgggtaatattccgctttactttcgcggggatattgcccggtgattttcattaaatctgactatacttagctcattttccgacgggtgccccgtctggtctgactgagacaagctttcaaggattcgtaacgtgattagcgatatcagaaaagatgctgaaatccgcatggaaaaatgcgtcgaagcattcaaaaaccaaatcagcaaaattcgcacgggtcgtgcttctccgagcctgctggacgggattgttgttgaatactacggtactccgaccccgctgcgccagctggccagcgtcaccgtcgaagactcccgtaccctgaaaatcaacgtctttgaccgttctatgtccgcggctgttgaaaaagcgatcatggcctccgacctcggtttgaacccaagctctgccggcagcgatattcgtgttccgctgccgccgctgaccgaagagcgtcgtaaagacctgaccaagatcgtgcgtggtgaagccgagcaggcgcgcgttgccgtgcgtaacgttcgccgtgacgccaacgataaagtcaaagcgctgctgaaagaaaaagagatcagcgaagatgacgatcgccgttctcaggacgacgtgcagaaaatgactgacgccgccatcaaaaaagttgacgcggcgctggcagacaaagaagcggaactgatgcagttctaatgctctgcccttactcaggccagacaggctctggcctgagtaaaatctgaaacgccgtacagaagactgtacgctcaattctcgggattgcgttgcaaccgctggccttgtagcctttagcgcttagttgaaggcctaatgccgccgtctcatccccgatagttgctgcgtaggggcttgctggcggcgttttgctttttattctgtttccactcttctggacgtctcatgaagcaattaaccgttctcggttcgaccggctccattggctgtagcacgctggacgtggtgcgccataaccctggtcgcttttccgtcgccgcgctggtcgcggggaaaaacgttgaccgtatggttgaacaatgcctggaatttaccccccgttacgcggtgatggacgatgcgcaaagcgctgagcggttgcgcacccgtctgcatgagcatggcagtcgcaccgaggtgctgagcggccagcaggcggcggcagaggtcgcggcgctggatgaggtcgatcaggtcatggcggcaatcgtcggcgcggcgggactggtgccgacgctggcggcgatccgcgccgggaaaacggtattgttagcgaataaagaatcgctggtgacctgcggtcgcttattcatggaggcggtgcaacagtcgggggcgcgattgctaccggtcgatagcgagcataacgctatttttcagagtatgccggagacaattcagcagcatctgggatacgctgatcttgcccggaacggcgtctcgtctatcctgctgaccggctccggtgggcctttccgcgagacggccgtggctgaactggcggcgatgaccccggatcaggcctgccgtcatcccaactggtcgatggggcgcaagatctccgtcgattcggccacgatgatgaacaaaggcctggaatatattgaagcgcgctggctgtttaacgcctcggcccagcagatggaagtgctgatccatccgcagtcggtgatccactcgatggttcgctatcaggatggcagcgtgctggcccagcttggggagccggatatgcgtacgccgatcgcccataccatgggctggccgcagcgactgaattccggcgttaaaccgctggacttctgtcagttgagcaatctgagcttctccgcgccggactatacgcgatatccgtgcctgaagttggcgatggacgcgtttgatgtcggccaggccgcgaccacgacgctgaatgcggctaatgaagagtcggttgccgcgtttctgcatggcgatatccgctttaccgatattgcggcggttaacctggcggtgctggataagatggacctgcaggagccgcaaagcattgatgatgttctggttatcgacgccgaggcgcgcgcaatcgctcaccagcagctgctgcggttggttgcgcaggcgtaacgcggtgatatttgtgggcgcaaggcttcggtgatatagtctgcgccacccgatcgttgcattttgttgttaaagattacggtggccgtgacaaaacacggcttttttgcgtaaagcttttggttgttctctgcgattggctgcagccccggcaccggataaaaatgcgtatccagcgcggcccggtggcctctgtttggtggctagttaatccttattatggacttaaaacgcgtgatgttgtctgctaatcaaactgtcagcgaaatatcgcccacccatggctgccgtcatgtcgccattattatggatggcaacggccgttgggcgaaacggcaaggtaaaattcgcgctttcgggcataaggccggggcgaaatccgtgcgtcgcgcggtctccttcgcggcgaataatgggattgaggcgttaacgttatacgcgttcagcagcgaaaactggaaccgtccggctcaggaagtcagtgcgctgatggaactgttcgtctgggcgctggatagcgaagtcaaaagcctgcaccgacacaatgtgcgtctgcggattattggcgacaccacgcgcttcaatgcgcgcctgcaggagcggatccgcaaagcggaagcgctaaccgcaaacaataccggcttaacgctgaatattgcagccaattacggcggtcgctgggatattacccagggcgttcgtttgctggcgaaacaggtacaggacgggacgctactgcctgagcagatcacggaagacatgctgagtcagcaggtctgcatgcatgaactggctcccgttgatttagttattaggaccgggggagagcaccgaataagtaactttctgatttggcaaattgcctatgccgaactttactttacggatgttctttggcccgattttgctgaacaggactttgaaggtgcactccatgcctttgttaatcgagagcgtcgtttcggcggcactgagccgggtggcagtcatgcctgatgggggtcacttttgctgaagtatcgcctgatatctgctttcgtcttaatccccatcgtcattgcggcattgtttttattgccgccgatgggctttgctatcgtcaccctggtggtctgtatgctcgccgcctgggagtggggacaactgagcggttttacctcgacgtcgcagcgggtttggctggcggtgctgtgcggccttctgctggcggcgatgctttttctgctgcctgaataccactatgacgttcatcaaccgatggttgaagggtcgctatgggcctcttttgcctggtggatcgtcgcgttactgctggtgctctcatacccggcgtcagcggcattctggcgccactctaaggtgctgcgcctcatcttcggcattctgaccatcgtcccgtttttctggggcatgctggcgctgcgcgcctggcactatgccgataaccactatagcggcgcgctgtggctgctgtacgtcatgatcctggtgtggggcgcggactctggcgcctatatgtttggtaaaatgtttggcaagcacaagctggcgccgaaggtctcaccgggtaaaacctggcagggcttttttggcggtttgctgaccgcggcagtgatttcctgggcctacggcgtgtgggcccatcttgacgtcacgccgacggtgctgctggtctgttcggtggtggcggccctggcttcggtgctgggcgacctgacggaaagtatgtttaagcgcgaggccggcattaaggatagcgggcacttgattcccggacatggtggtattctcgatcgtatcgacagcctgacggcggcggtaccggtcttcgcctgtctgctactgttggtcttcaggacgatttgacggaaggttatatgctgagcgtgctctggaatctggcggcttttatcattgcgcttggcgtactgattacggtgcatgagtttggccatttttgggtggcgcgccgctgcggtatccgggttgagcgtttttctatcggcttcggcaaagcgctgtggcggcggatggataagcagggcacagagttcgtcatcgccctgatcccactgggcggctacgtcaagatgctggatgagcgtgttgaagcggtggcgccggagatgcgtcactatgccttcaacaataaaaccgtcggtcagcgtgcggcggtgattgccgccggccccatcgctaacttcattttcgctatctttgcttactggctggtctttatcatcggcgttcccggcgtgcggccggtggtgggtgaaataacgcccaattcggttgccgcgcaagcacaaattgcaaaaggaacggaacttaaagcgatagatggtatcgaaacgcctgattgggatgcggtgcgtctgcagctggtggccaaaatcggcaacccgcaaacaatagttaccgtcgcccctttcgggaccaatcagcgccaggataaaatcgtcgatctgcggcactggtcgtttgagccagacaagcaagatcccgtgacctctctggggatccagccgcgcagcgcgcagattgatacggtgctggctgaggttcaggcgggatcggcagcccagaaagcgggtttgcaagcgggcgaccggatcgttaaagtcgatggtcaaccgttaacgcagtggatgacgtttgttaatctggtgcgcgataatccgggcaaagcgctggcgctggagattgaacggcaggggagtgcgctgccgttaaccctgacgccggatgcgaaaacggtgaaaggtaaggcggaagggttcgcaggggtggtgccaaaggtcatcccgctgcctgaagaatacaagacagtacgtcagtacggaccgtttgccgccatcgctgaagccacggataaaacctggcagctgatgtcgctgacggtcaggatgctgggtaaattgataaccggtgatgtcaaactgaacaacctcagtgggccgatctctatcgctcagggggctggaatgtcagcggagtttgggttgatttattatctgatgttcctggcgctgattagcgtgaacctcggaatcatcaacctgttccctctacccgtactggatgggggacatctgctgtttttagcgattgaaaagctgaagggcgggccggtatccgagcgagttcaagactttagttatcgcattggctcaatactgctggtgctgttaatggggcttgcacttttcaatgatttctctcggttataagagagtttgttaggaagaacgcataataacgatggcgatgaaaaagttgctcatagcgtcgctgctgtttagcagcgcgactgtatacggtgctgaagggttcgtggtgaaggacattcatttcgaaggcttgcagcgtgtcgctgttggtgcggccctcctcagtatgccagtgcgtcctggcgatacggtgaccgacgatgatatcagtaacactattcgcgcgctgtttgccactggcaacttcgaggacgtccgcgtcctgcgcgatggtgataccctgctggtgcaggtgaaagagcgtccgacgatcgccagcatcactttctccggcaacaagtcggtgaaagatgacatgctcaagcagaaccttgaggcctcaggcgttcgggtgggcgagtcgcttgaccgcacgaccatcgcggatatcgagaagggtcttgaagacttctactacagcgtcggtaaatacagcgccagcgtcaaagcagtcgttacgccgctgccgcgtaaccgtgtcgatttgaagctggtcttccaggaaggcgtctccgcaaaaattcaacagatcaacatcgtcggcaaccatgcgttttcgaccgatgagctgatctcccacttccagctgcgcgatgaggtgccgtggtggaacgtggtcggcgaccgtaaataccagaagcagaagctagcgggcgaccttgaaaccctgcgcagctactacctggatcgcggctatgcccgtttcaacatcgattctacccaggtcagcctgacgccggataagaaagggatctacatcaccgtcaacatcaccgaaggcgatcagtacaagttttccggagtgcaggtgacgggcaacctcgctggccattccgcggaaatcgaagcgctgactaaagttgagccaggcgaactgtacaacggcgcgaaagtgaccaagatggaaaacgacatcaagaaactgttgggtcgttatggttacgcctatccgcgcgtgcagtcgcagccggagatcaacgacagcgataaaaccgttaagctgcacgttaacgtcgacgcaggcaaccgttattacgtgcgtaaaattcgcttcgaaggcaacgacacctctaaagatgccgtactgcgccgcgaaatgcgccagatggagggcgcatggctggggagcgacctcgtcgatcagggtaaagaccgtctcaaccgtttaggtttctttgaaacggtggatactgatacccagcgcgtgccgggcagcccggaccaggtcgacgttgtctacaaggtgaaagagcgtaacaccggtagcttcaacttcggtatcggctacggcaccgagagcggcgtcagcttccaggcgggcgttcagcaggataactggttaggtactggctatgctgtcgggatcaacggtaccaaaaacgactaccagacctataccgagctgtcggtgaccaacccgtacttcaccgtagacggtgtaagcctcggcggtcgtgtcttctataatgactttgatgcgaacgatgcggatctgtctgactataccaacaaaagctatggtacagacattacgctgggcttcccggtcaacgaatacaacacgctgcgcgccggcgtcggttatgtgcataactccctgtccaatatgcagccgcaggtggcaatgtggcgttaccttaactcgatgggccagtatccggacaacaccaacgaccggaactcgttcagtgcgaatgacttcaccttcaactacggttggacctataacaagcttgaccgcggcttcttcccaacggaaggttcgcgcgtcaacctgaacggtaaggtgaccattccgggctcagacaacgagtactacaaagcgacgctggataccgcgacctacgtgccgatcgacaacgatcatcagtgggtagtactgggtcgtacgcgctttggttatggcgatggtattggcggcaaagagatgccgttctatgagaacttctatgccggtggttccagcaccgtgcgtggcttccagtcgaacaccattggtccgaaggcagtgtacttcccggcaagcagtcgtcatgatgatgacgatagttacgataatgaatgtaagagcaccgaatccgcaccgtgtaaatccgatgatgcggtgggcggtaacgcgatggcggtggccagccttgagctgattaccccgacgccgtttattagtgacaaatatgcgaactcggtccgtacttccgtcttctgggatatgggtaccgtatgggatactcactgggattcgagcgcgtacgctggttatccggattacagcgatccgagcaacatccgtatgtctgcgggtattgccgtgcagtggatgtcgccgttggggccgttggtcttctcctacgcccaaccgttcaaaaagtacgatggagacaaagccgaacagttccagtttaacattggtaaaacctggtaattgttggcggcaacggaatgcaagtgcagtatagcgctgactgtaggcgataacgcgtttatcgcctcgccacgcaaataacggtacccctgggtactcatgggatggtaaggagtttattgtgaaaaagtggttattagctgcaggtctgggtttggcaatggtaacttccgctcaggcggcagataaaattgccctggtgaacatgaacagcctgttccaacaggttgcccagaaaactggcgtttccaacacgctggaaaacgagttcaaaggccgcgctagcgaactgcagcgtatggaaggcgacctgcaatccaaaatgcagcgtctgcagtccatgaagccgggcgccgaacgtaccaaactggaaaaagacgtgatggctcagcgccagaccttctcccagaaagcgcaggcgtttgaacaggatcgcgcacgtcgttccaacgaagagcgtggcaaactggttacccgtatccagactgccgtacagagcgtagcgaaagatcagagcatcgatctggtggttgacgcgaatgccgttgcatataacagcagcgatgtaaaagacatcaccgctgatgtgctgaaacaggttaaataagtaatgccttcaattcgactggctgatctcgcgcagcagttggatgcagaattacacggtgatggcgatatcgtcatcaccggcgttgcgtccatgcagagcgcgaaaacgggccaaatcactttcatggtcaaccctaagtaccgtgagcacctggccgcttgccaggcttctgccgttgtgatgacgcaggatgatttaccttttgcccatagcgccgcgctggtagtgcgtaacccctacctgacctacgcgcgcatggctcaaattcttgataccacgccgcagccggctcaggatatcgcgccgagcgcggtcatcgatccgtcggcgaagctgggtagcaacgttgccatcggcgccaacgcggttatcgaatccggcgtagtgctgggcgataacgtagttatcggcgcaggctgcttcgttgggaaaaatacgaaaataggcgccggctcgcgtttgtgggctaatgtgaccgtttaccatgagattgagatcggcgagaattgcctgattcagtccagcacggtgattggcgcggatggcttcggctacgctaacgatcgcggtaactgggtaaagatcccgcagttgggtcgcgtcattattggcgatcgcgtggagattggcgcctgcaccacgattgatcgtggtgcgctggacgataccgtgattggcaacggggttatcattgataaccagtgccagattgcgcataacgtggtgattggcgacaataccgcggtcgctggcggcgttatcatggcgggcagcctgaaaattggccgctactgcatgattggcggcgccagcgtgattaacggtcatatggaaatctgcgataaggtcaccgtcacggggatggggatggtgatgcgtcctatcagcgaacctggcgtatattcctccggtattccgctgcagccgaacaaggcgtggcgtaaaaccgctgcgctggtgatgaatattgacgagatgagcaagcgcctgaaagcgattgagcgcaaggttaatcaacaagactaattcatcatttggtcacatgacatttccggcctgttgcattcgctaaaagattgccgcaggccgtgttattattgccttttagtacatttagacaggaagagtattttgactactgacactcatactctgcacattgaagagattctggaacttctgcctcaccgttacccgttcctgctggtagaccgtgtgctggattttgaagaaggtcgttttctgcgcgcagtaaaaaatgtttctgtaaacgagccgtttttccaggggcacttccctggtaagccgattttgccgggcgtcctgattctggaagcaatggcgcaagccaccgggattctggcgttcaaaagcgtcggaaaactggaaccaggcgagctgtactacttcgcgggtatcgatgaagcacgcttcaaacgcccggtagtaccaggcgatcagatgattatggaagtcactttcgagaaaacccgccgcggcctgacccgtttcaaaggcgttgcgctggttgacggtaaagtggtttgcgaagcgacgatgatgtgtgcgcgtagccgggaggcctgatacgtgattgataaaaccgcttttgttcatcctaccgccattgtagaagaaggcgccgtgattggcgctaacgtccacattggtccgttttgtattgttggcgctaacgtcgaaatcggcgaaggcaccgtgctgaagtctcacgttgtcgttaacggccacaccaaaatcggccgtgacaatgagatctatcagttcgcttccatcggcgaagttaaccaggatctgaaatatgctggcgaaccgacccgggtggaaattggcgatcgcaaccgcattcgcgaaagcgtcaccattcatcgcggcacagtacagggcggtggattaacaaaggtgggcaacgataacctgctgatgatcaacgcccacgtggcgcatgattgtacgcttggcgatcgctgcattctggccaataacgcgacgctcgcgggccatgtttcgctggatgattatgtcattatcggcggcatgacggcggtgcatcagttctgcgtcattggctcacacgttatggttggcggctgctccggcgtggcgcaggacgttccgccgttcgtaattgcccagggcaaccatgcgacgccgttcggcgttaacatcgaagggctgaaacgccgcggcttcagccgggaagcaatcaccgcgatccgcaacgcgtataaactgctgtaccgcagcggcaaaacgctggaagaagccaagccggaaatcgccgaactggctgctcagcatcctgaggttcagccgtttgtcgatttcttcgctcgttctacccgcggcttgattcgttaatggctgaacagcgtcccctgacgatagccctggtcgccggagaaacctccggcgatattctaggcgctggtctcatccgcgcgcttaaagcacgcatcccgaatgcgcgctttgtcggcgtggcggggccgctaatgcaggcggaagggtgcgaagcctggtatgaaatggaagagctggcggtgatgggcattgttgaagtgctcggtcgcctgcgtcgcttactccatattcgcgccgatttgacccgccgcttcggcgagctgcgtcccgatgtcttcgtcggcatcgacgcccctgactttaatatcaccctcgaaggaaatctgaaaaagcagggcatcaaaaccattcactacgtcagcccgtcggtctgggcctggcgacaaaaacgcgttttcaaaatcggcagatccaccgatctggtgctggcctttctgcctttcgaaaaagcgttttatgacaaatttaacgtcccctgccgctttattggccataccatggcggatgcgatgccgctggatcctgacaaaggcgctgcgcgcgaccggttagggatcccgcacagcgtgcgctgcctcgctctgctacccggcagccgcggcgcggaagtcgaaatgcttagcgccgacttcctgaaaaccgcgcagcttctgcgcgccacctatcccgatctgcaggtggtggtgccgctggttaatgctaaacggcgggagcagtttgagcgtattaaagctgcgacggcgccggatatgatcgtgcatatgctggacggtcaggcgcgcgatgcgatgatcgccagcgacgccgcgctgctggcctccgggacggcagcgctggagtgtatgctggcgaaatgcccgatggtggttggctaccggatgaagccgttcaccttctggctggcgaagcggttggtaaaaaccgactacgtctcgttaccgaacctgctggcgggtcgcgaactggttaaagagctgctgcaggatgagtgcgagccccaggcgctggcagccgctctgcagccgctgctggccgatggcaaaaccagccatgagatgcatgagacgttccgcgccctgcatcagcagatccgctgcaacgccgatgagcaggcggcggacgccgtactggagttagcaaaacaatgatggagttcgtctatccgcatacccatctggttgccggcgtcgatgaggtcgggcgtggccccctggttggcgcggtggtgaccgcggcggtgatcctcgatccggcgaagccgattgtgggtctgaatgattccaaaaaactcagcgagaagcgtcgtctggcgctgttcgatgagattaaagagaaagcgctgtgctggagcctggggcgcgccgagccgcacgaaatcgacgagctgaatattctgcatgccactatgctggcgatgcagcgcgccgtcgccggcctgagcattgttcctgagtttgtcctgatcgatggcaaccgctgtccgtcgctaccgatgccctcccaggcggtggtgaaaggcgacagccgggtggcagaaatcagcgcagcgtctattctggcaaaagtcactcgtgacgccgaaatggccacgctggacctcgcatttccccactacggatttgcccagcataaaggctatcccaccgctgttcacctgcagaagctgcaggaacacggcgcaacagagcatcaccggcgcagttttggcccggtgaagcgtgccctgggcctggcgtccaactaagtcaccgggatctaaagatggctgaaccacgtttcgtacacctgcgggtgcacagcgactattccatgatcgatgggctggcaaagaccgggccgctggtgaagaaggcggcctcgcttggcatgccagcgctggcgatcaccgatttcaccaacctctgcggactggtgaagttctacgggacgggacacggcgcggggattaagccgatcgtcggcgccgactttcacgtgcagtgcgacctgctcggcgacgaatttaccgagctgaccgtgctggcggcgaacaacaccggctaccagaacctgaccctgttgatttcccgcgcctatcagcgcggctacggcgccctggggccgtggatcgatcgcgactggctggtggaacatcaggaagggctgattctgctctccggcggccggaaaggtgacgtcggcgtcagcctgatccgcggcaatatgccgctggttgaacagtgcgtcgccttctacgaagagcatttcccggaccgctattttctggagctgatccgtaccggtcgacaggatgaagaggcctatctccacgccgccgtggcgctggcggaagcgcgcggcctgccggtggtggcgaccaacgatgtccgctttctcgacaccagcgatttcgacgcccatgaaatccgcgtcgcgatccacgacggctttacgctcgacgacccgaaacggccgcgcaactactcgccgcagcaatatatgcgcagcgaggaagagatgtgcgagctgttcgccgatattccggaagcgctggcgaacagcgttgaaattgccaagcgctgcaacgtcaccgtgcggcttggcgaatatttcctgccgcagttcccgaccggcgatatgaccacggaagatttcctggtcatgaaatcgaaagagggtctggaagagcggctggaattcctcttcccggatcctgccgtccgtgctgaaaagcgcccggagtatgaccagcgtctggatattgagctccaggttatcaaccagatggggttcccgggctacttcctgattgtgatggagtttatccagtggtcgaaggataacggcgtgccggttggcccgggacgtggttccggcgccggttcgctggtggcctacgcgctgaagatcaccgatcttgacccgctggagttcgacctgctgttcgaacgtttccttaacccggaacgtgtctcgatgcccgacttcgacgtcgacttctgcatggagaaacgcgaccaggttattgagcacgtggcggatatgtacggccgcgacgcggtatcgcagatcatcaccttcggtaccatggcggcgaaagcggtcatccgcgatgtcggtcgcgtgctgggtcacccgtacggatttgtcgatcgtatctccaagctggtgccgcccgatccgggcatgacgctggcgaaagccttcgaggccgagccgcagctgccggagatctacgaggcggacgaggaagtgaaggcgctgatcgacatggcgcgtaagctggaaggggtgacgcgaaacgccggtaaacatgccggtggggtagttatcgctccaaccaaaatcaccgatttcgcgccactgtattgcgatgagcaggggctgcatccggttacccagtttgataagaacgacgtggaatacgccgggctggtgaaattcgacttcctcggtctgcgtacgctcactatcattaactgggcgctggagatgatcaacaagcgccgtgagaagaacggcgaagggccgctggatatcgccgccatcccgctggatgacaagaaaagcttcgacatgctgcagcgctcggaaaccaccgcggtcttccagcttgaatcgcgcggcatgaaagatctgattaaacgcctgcagccggactgcttcgaagatatgatcgcgctggtggctctgttccgcccgggcccgctgcagtcggggatggtagataactttatcgaccgtaagcatggccgcgaggagatctcttatccggacgtgcagtggcagcatgaaagcctgaaaccggtgctggagccaacctacggcatcatcctgtatcaggaacaggtcatgcagattgcccaggtgctgtccggatacaccctcggcggcgcggacatgctgcgtcgtgcgatgggtaagaaaaagccggaggagatggccaagcagcgttctatctttgaggatggggcgaagaaaaacggcattgacggcgaactggcgatgaaaatcttcgacctggtggagaaattcgccggttacggatttaacaaatcgcactccgccgcctacgcgttggtctcctaccagacgctgtggcttaaggcgcactacccggccgagtttatggcggcggtgatgaccgccgatatggacaacaccgagaaagtggttggcctggtggatgagtgctggcgaatggggctaaaaatcctgcccccggatattaactccggcctgtaccatttccacgtcaacgacgatggcgagatcgtctacggcattggcgccatcaagggcgtcggcgaaggaccgatcgaagcgattattgaggcgcgcaacaatggcggctatttccgcgagctgttcgacctctgcgcgcgaaccgatattaaaaagctcaaccgtcgggtgctggaaaagctgattatgtccggggcgttcgatcgtctcggcccacatcgcgcggcgctgatgaattcgctgggcgatgcgttgaaagccgccgaccagcacgcgaaagccgaggccatcggccaggctgatatgttcggcgtgctggcggaagagcccgagcaaattgagcaatcctacgccagctgccagccatggcctgagcaggtggtgctggatggtgaaagggagaccctggggctatacctcaccggacacccgattaaccagtatctgaaggagattgagcgctacgtcggcggcgtgaggctcaaagacatgcatccgaccgaacgtgggaaagtcaccacggcggcggggctggtgattgcggcgcgggtaatggtcaccaagcgcggcaatcgtatcggcatctgtaccctggatgaccgttccgggcggctggaagtgatgttattcaccgacgcgctggataaatatcagcagttgctagaaaaagaccgcatacttatcgtcagcggacaggtcagctttgatgactttagcggggggcttaaaatgaccgcccgtgaagtcatggacattgacgaagcccgggaaaaatatgctcgcgggcttgctatctcgctgacggacaggcaaattgatgaccagcttttaaaccgactccgtcagtctctggaaccccaccgttcgggaaccattccagtgcacctctactatcagagggcggatgcacgcgcgcggttgcgtttcggcgcaacatggcgcgtctctccgagcgatcgtttacttaacgatctgcggggccttatcggctcggagcaggtggaactggagtttgactaatacaggaatactatgagtctgaatttcctagattttgaacagccgattgcagagctggaagcgaaaatcgattccctgactgcggtaagccgtcaggatgagaaactggatattaacatcgacgaagaagtgcatcgtctgcgtgagaaaagcgtagagctgacgcgcaaaatcttcgccgatctcggtgcatggcaggttgcgcaactggcgcgccacccgcgccgtccttacaccctggattatgtccgcctggcgttcgacgaatttgacgaactggccggtgaccgcgccttcgctgacgataaagcgattgtcggcggtatcgcgcgtcttgacggtcgtccggtgatgatcatcggccaccagaaaggtcgtgaaaccaaagagaaaattcgccgcaactttgggatgccggcgccggaaggctaccgcaaagcgctacgcctgatggagatggctgagcggtttaaaatgccgatcatcacctttatcgacaccccgggcgcctacccgggcgtcggcgcggaagagcgtggccagtcggaagcgatcgcccgcaacctgcgtgagatgtcgcgtctgagcgtgccggttatctgcaccgtaatcggtgaaggcggctccggcggcgcgctggcgatcggcgtgggcgacaaggtcaacatgctccagtacagcacctattcggtcatttcgccggaaggctgcgcctccattctgtggaagagcgcggataaagcgccgctggctgcggaagcaatgggcattatcgccccgcgtctgaaagagctgaagctgatcgattctatcgttccggaaccgctgggcggcgctcaccgcaacccggaagcgatggcggcaagcctgaaggcgcagctgctggcagacctggcagacctcgatctgctcagcgaagaagagctgctgaaccgccgttatcagcgtctgatgagctacggttacgcttaactttttcgtcaggacttaacactaagggccggattttccggccctttttttatgtgcgatgcgcccgggggattgctatgatgcttgacttaggttaataccaggaggaaagcgtgaatatcatcgccatcatggggcctcacggcgtctaccacaaagacgagccgatcaaagaactggaagcggcgctgcagcgccagggcttccagaccatctggccgcaaaacagcgccgacctgctgcagtttatcgagcacaacccgcgcatctgcggggtgatcttcgactgggatgaatacagcgtcgatctgtgcagcgatatcaatcagctcaatgaataccttcctctgtacgcctttattaacgcccactcgacgatggatgtcagcagtcaggatttgcgcatgacgctgtggttcttcgaatatgcgctgggactctccgaagagatcgccacccgcattgggcagtacacccgcgagtacctggagaatatcaccccgccttttacccgcgcgctgttcaactatgtccaggagggaaaatataccttctgcacgccgggccatatgggcggcagcgcctatcagaaaagcccggtgggctgcctgttctatgatttttttggcgggaatacgctgaaggcggatgtctcgatttcggtcaccgagctgggctccctgctggatcataccggcccgcacctggaggcggaggagtatatcgcgcgcgcctttggcgccgagcaaagctatatggtgaccaacggcacctcgacgtccaataaaattgtcggcatgtactcggcgcccgccggcagcaccctgctgattgaccgtaactgtcacaaatcgctggcccacctgctgatgatgagcgatgtggttcccctgtggctgaagccgacccgcaacgcgctggggatcctcggcggtatcccccggcgcgaatttacccgcgacagcattcagcagaaagtgcgcgacacgggcggggcgcagtggcccgtgcatgcggtgatcaccaactccacctacgatggtctgctctataacaccacctggcttaaggagacgctcgatgtcccgtcgatccatttcgattccgcctgggtgccctatacccatttccatccgatatatcaggggaaaagcggtatgagcggggagcggatccccgggaaagtcatcttcgagacgcagtcgacgcataagatgctggccgcgctgtcgcaggcctcgctgatccacattaaaggcaactatgatgaagagacctttaacgaagcctttatgatgcatacctctacgtcgccgagctaccccatcgtcgcgtcgattgagaccgcggcggcgatgctgcgcggcaactccggtaaacgtctgatccagcgctccattgagcgggcgctggacttccgcaaagaggtgcagcgactgcgtgaggagtcggacggctggttctttgatatctggcagccggaagccgtggataaagccgagtgctggccggtagcgccgggcgaggactggcacggtttcaaagatgccgatgcggatcatatgtatctcgatccggtgaaggtcaccattctgacgccgggcatggacgagcaggggaatatggatgaagaggggatcccggcggcgctggtggcgaagttcctcgacgagcggggcgtggtggtagagaaaacaggcccctacaatctgctgttcctgttcagtatcggcatcgataaaacccgggcgatggggctgctgcgcggcctgaccgagtttaaacgcgcctacgatctcaatctgcgggtgaaaaatatgctgccggatctgtacgccgaagatcccgacttctaccgcaacatgcggatccaggatctggcgcaggggatccaccgcttgatccgtcagcatcagctgccgcagctgatgctcagcgcctttgacgtcctgccggaaatgaaaatgacgccgcatcacgcctggcagcgccagatcaagggggaggtggaaactattgaactggagaacctggtggggcggatttcggccaacatgatcctcccttatccgccgggggttccgctgctgatgccgggagagatgatcaccgaggaaagccgggcggtgctcgattttctgctgatgctttgctctatcggtcgtcattacccgggctttgagaccgatattcacggcgccaagcgcgatgaggacggtgtgtatcgggtacgagtcttaaaaaatgacgaaaggcttgcgcgttaacggcgcgcacgagtaacgtggctggcttaacagaaggagtttaaccatgctgggtttgaaacgggttcaccatattgccatcattgcgaccgactacgcccgcagtaaagcgttctattgcgatattctggggtttacgctgcaaagtgagttttatcgcgccgagcgcgattcctggaaaggcgatctggcgctcaacggcgagtatgtgattgagttgttctcgttcccgtttccgccagcccgccccagtcgtccggaagcctgcgggctgcgtcatctggcctttagcgtggatgacatcgacgccgcggtagcccatctcacctcgcatggcgtggagtgcgaagcgattcgtgtcgatccctttaccggtaaacgctttaccttctttagcgatccggacgacctgccgctggaaatatatcagcagtaaatcttgccagcgcgaccctggcccggtaacgtgccgggccatcacttctcggtatgttcgtggatatgacggctgatattgcgcatacgcttcatccccatcgccagctgctggtggccttcagcggcggtctggactcgacggttcttctgcatcagctggtgctgctgcgggaacaggatccctcgctgacgctgcgggcggtgcatgttcaccacggccttagcgcccacgcagacgactgggtggcgcattgtcggcagatttgccagcagtggcaggtgccgctggtggtgcatcacgtgacgttagcccggggagggctgggcgtcgaggcccacgctcgtgcggcgcgctatcaggcctttcaggatacgctcaatgccggcgaggtgttagtgaccgcccagcaccaggacgatcagtgcgaaaccctgctgctggcgttaaaacgcggcagcggtcctaccggcctgtcggcgatggcgccatcctctgcctttgccggcagtcgactgctgcgtcctctcctcaatgaaacccgcgaatcactacgccagtgggcgctcgcccatcagctgtcgtggatcgaagatgagagtaatcaggatgatacctatgaccgcaatttcctgcgcctgcgggtgatcccggtgctgcgcgagcgttggccgcactttagcgaggccgtcgcccgcagcgccagcctgtgcgccgagcaggaacaactgctggacgagatgttggcggcggagctggcgtcgctggtggccgaagatggctcgctggctatcgcgccgctggcgacgatgagtccgccgcgccgagcggcgctgctgcgtcgctggctcgccgggcagcaggcgccgatgcccgcccgcgaggtgcctgagcgcctctggcacgaggtggcgctggcgcgggaagatgccagcccctgtctgcggctgggggaatttaccgtccgccgttttcaacagcgtttgtactgggtgaagtatcttcccggtcagacggacagcgttcagcgctggcccgactggcgccagccgctgcggctggcggacggtctcggcgagctgacgctgcggcccggcggcaggctgcgcccgccgtcggcggatgagccggtcaccgtccgctttcgcgccagcggccacctgcatattgtcgggcgccatggcggacgcaagcttaagaagctctggcaggagctgggcgttgctccgtggcgacgagacaccacgccgctgctgttttacggcgaaacgccgattgccgcagcggacgatctgtttgtgaccacagaaggtgaagtgaaggacggggaaggggtcaggctgatgtggaggaaaacgggcgattaagcccgtttttgattcaggattcgctcaccaccacggtgccgatttccgggtgactgaagctggcgattttatccaggcgcagctcgcggacgttgccggcgagttcgaccaccagatactcgatattttttcgcgagataagatcgctggcctttgcctgcagctgttcgccatccttcagcgccagcgtcagcaccaggtgatgctggcaggccagctccaggttgtcgtaatcatcgcagttaatgggttgataagtatcattcattgacataatcgctcaccagtaagtttgctgccgcataagcggccttttccctgactgactccgaaagggcctcatccgccgcaatctcattcaatactttcaacacgcaacccagcgcatccgggatataccctaagtctccgctggctatttccgcataccgcttgcgtattaactcacaatagtggtccacatgccctcctgtcagcgttctgactcaaccgtgggatgcaagtttaagcctacgaagataaactctgtttagcaagggaactatatcatagtcatttaagcaatttcagcaggatgaaacaggttgctgcgattgacgacagccttttgccgccagtttcgctacaatgtacgccattcttttcaggagtttattcatggcgctgaaagcgacaatatataaagctgcggtaaatgtagccgatctggatcgcaaccagtttctggatgctaacctgacgctggctcagcatccgtcagaaacccaggagcgcatgatgctgcgcctgctggcatggatcaaatatgccgatgaacggctacagtttacccgcggtctatcgtcggatgacgagccggagctgtggctgcttaacgatcatctcggggtcgatctgtggatcgaactgggtctgccggatgagcggcggattaagaaagcctgctcacgggcgcaggcggtggcgctgtttgcttataatagccgggcagctgaaatctggtggcagcagaatcagagcaagcttgcggcgtacccgaagctgaccatctggtatcttgatgatgcgcaactggcactgcttagcgcctttgccgaccgtaccatgacgctgcaggccactctgcaggagggcagtatctggttatccgacgctcggaataatctggaaattcagcttaccgcctggcaagcgtcggcatgattactattagccgcagcgtagccctcgccgacgacgagatcgtcttgtcaggcattcgcgcccagggagcaggggggcagcatgtgaacaaagcgtcgacggcgatccatctgcgctttgatattaaagcttcaagcctgccggagttttacaaagagcgcctgctcgccgccagccaccacttaatttctgctgacggtgtggttatcattaaggctcaggaataccgcagccaggagatgaaccgtgaagcggcgatcgcccggttggtggcccttattaaagaattaaccgcagtgcaaaaaagtcgccgggagacgcgaccgactcgggcatcgaaagagcgacgccttgcttccaaggcacagaagtcctcagtcaaggcgctgcgtgggaaagttcgccagtgaaggcgtcggcgaacgggtgaaatggatgataaggaaagcaaagtgaagaaaatcgtattctccgtgatagcggcctgttcgctgttcgcgctgtttggttgtaaccatcgcgccgagactgacacggtccagccagcggcgatggaagagctcaagccgatgcagcaaagctggcgaggcgtgctgccttgcgcggattgcgaaggtatcgacacctcgctgttcctggaaaaagacgggacctgggtgatgaatgagcactaccagggcgcccgtcgtgagccgtcatcctttgcctcgtacggcacctgggcacgtaccgcggataagctggtgctgaccaacagcaagggcgagaaatcttactttcgcgcgaaaggcgacaagctggagatgctcgaccgcaacggaagccccattcagtctcctctcaactataccctggagccagtgaaggccagcctgccgacgacgccgatggcgatgcgcggcatgtatttctatatggccgatgcggcaacctttaccgattgcgcgaccggtaaacgcgtcgcggtggcgaacaatgcccagcttgaacgggattatgccgccgcgcgcgggaccgatactcgcccggtactgctggtggtagaagggcactttactctcgaagcgaacccggataccggcgagatgatgaaaacgctgatgacggatcaagccggcaaatttattcccggtaaagactgcagccattgattgtcaggcccctgtccgggtaacgggcaggggatgatcccgcgcagtaccacctacttcctcctgttattagccctgtcacatcaagagtgagcgtggatctggctggcggaaaagcgtcaatcgtttctttactccgcaccgtccttcggtttgttcagccccaccagcttaccggcctgaagataaactcccagtttcaaatgcccgacatactggagctgcgtttcgggtttaaacgtggcgacgtctccttcccgcatgtgcagcagatcggaaggactgatccacgccgcctgcgcgagcgtcagcggatgcccggctcggacaaaggcctcgctgacaaactccgagcaaaaccacgctttcttgtcgccgcttgccgcatcgcccagctgcgctttagccaggccgctgacgcactgctggcgaaagtctcgtgagaaggggttgagcgagcagagcggtttggtgaccatataagggataaactgaataatgccgcgatagttatacccgctgtctttgacctgccaggcaaaacttttcatcgccgtcgcctggtccggcgtcaggtcaggcaccctgagagcaaagagtttatcgctgtgcgccagcgcctgctgaagggtaatcacttgtacgccggcgccggtggcttccgctacctgaccttcgccaacatacagcgcgacgtggcttacggaagaggcgctgaaggcgcggatcccaagcgatgtgacgcccaggctggaggagaacagcaggtcgccggagcgcaggtcgctttcggcgatttcgcgcagtccgctgccggcaatcgagctttgacgctggagggtaacagcccaggatgatgaatggtcatcggcagcagatgtggaaggcgagctgcggccgacgtccagggtacaggcggtaagtaggagcagggcaaaagtaagcagtccgctgcggaggagatgtgcagtcattggtactgtccttgtaaaaaaaaggccctgacatccgttcagggccctgaggtgggtgttagccttttatcgctttaaccagatattccacaatatccccggtcttaatcagctgcttctcaccgttgcgacgatacttgtattcgatatcatcgttgtcgaggttacgatcgcccagcacgatggtgtgcgggataccgatcagctccatatcggcgaacatcacgcccggacgctctttacgatcgtccatcagcacttcaataccctgggcgctcagctcggcgtacagtttctccgccagctcctgcacacggtaagacttgtgcatgttcatcggcaggatcgccacctggaacggcgcaatcgcatccggccagacgataccgcgatcgtcaaagttctgctcaatcgccgccgctaccacgcgagtcaccccgataccatagcagcccatggtcaggatctggttacgcccatcttcgccctggaccgcggctttcatcgcctcggagtacttcgtccccagctggaagatatgacccacttcgataccgcgcttaataagcagggtacctttaccgtccgggctcgggtcgccggcgacgacgttacggatgtcggccacttccggcgtcgcgacatcgcggtcccagttgatgccgaagtagtgtttgccatcgatgttggcgccagcggcgaaatcgctcatcaccgctacagtacggtcgataatcaccggaaccggcatgttcaccgggcccagggagccaggaccggcgttcaccagggcgcggatctcttcttcggtggcgaaggtcagcgggctggcgacctgcggcagtttttccgctttcacttcgttcagctcgtgatcgccgcgcaccagcagggcaaccagcggggaagcgctatcttcaaccgctttcaccagcagagttttcacggttttttcgatcggcaggttgaactgctccaccagctcggcgatggttttggcgttcggcgtatcgaccagggtcatctcctgggtggcggctgcgcgcggctctttcggcgcaacggcttccgcaaactcgatgtttgccgcgtagtcggagctgtcggagaagatcacatcgtcttcgccgctctgcgccagcacctggaattcatgagaggcgctgccgccgatagaaccggtgtcagcctgtaccgcgcggaaatccagccccatacggctgaagattttgctgtaagcggcatacatcgcgtcgtaggtttcctgcagcgattcctgagaagtatggaaagagtaggcatctttcatcaggaattcacgggagcgcatcaccccgaaacgcgggcgtacttcgtcgcggaatttggtctggatctgatagaagttcagcggcagctgtttataggagttcagctcgttgcggatcagatcggtaatgacctcttcgtgggttgggccgaggacgaacggacgatcgccgcgatcggcaatgcgcaacagttccgggccgtactgctcccagcgcccgctctcctgccacagttcagatggctgaacgaccggcattaacacctcgatcgcaccggcgttgttcatttcttcacgcacgatgttttcgacttttttcaggacgcgcacgccggtcggcagccaggtgtataacccggaggccagcttgcggatcatcccggcgcgcagcatcagctgatggctgattacctcggcgtcggcaggtgtctccttcagagtggagagcagatattggctagtacgcatgttgtaacggttccagttaaacgagcggaacaggctggttgcccagcctgaaacaaaaaaagtggtttagtttaccagtgtggcaaagatgccaaaagagaggaaaataaaattagcgcgcttcgagggcaaagacttcaaaaccggaggcagtcacccgccagcggacgttgaaatccagcagccagacggcatatgtttttcccgcttgttcctcttttcggtaggccggacgcggatcctgcgccagcacctcgcggataaacgctttgatatgtgggtagcgtttttccagcgtgagtaactgtgcgtctatttccggcgtaaagctgacgttcatacccgccagcggcgcctgctgtgcatagctggcgctggcgtccggcagggcttcggcgaaaggaagatacggtttgatatcaaccaccggcgtcccgtcgacgagatcgaggctgccgagttccagtattacctgatctttctgacagcgaatgcccttgagctcaacgagcgacatgccgatgggattagggcgaaacgttgaacgggtggcgaagacgcccatccgcgcattgccgcccagtcggggaggtcgcaccgtcggacgccaaccgccttccattgtctgatgaaacacaaacaggatccacagatggctgaagctctccaggccacgcacggcgtcggcctggttatagggcgcgaccagatggagttctccgccgccgtgtttcaccaggcctggctggcgaggaacggcaaacttctctttatacggcgaacggatgacgcctatctgcgcgaactgaaatgcgctcattgcgccgagacgttaagcgctgaacccaggcaaacggcctgacggtagcagcctggcgtaccgctggtcacttcgcagcggtgaagcaggacggcattggctttcatacgcgcggcattaatttgcaggcgcttgcgcgcggtggggatattcggcggagaatcctgattcgaagcctggcaggactcgccagatacttcacccagatcgcggaacggtttaccaaccagctctgacgcatcggtgtaaatacgtactggggccgggcgggtggcgcgcggtttgctcggctcagatttaaccggcggggttgcagtgctttgagcaggctcaacgggagatctgcttagcatggaacaaccgcttaacatgagtgctaacaaacagatcggtaaagcacgcatagtatttcctcaatgaataaaaaacagggcgttattgaatcaggtgcttgcataaatgacaagacgggcgtgaagcccgtcctgaatgatattacggtgagaaaagattaccagcctttcacggcaccgccgttaaagatcttgttcgctgcttcgtaaacttcatcgctctggtaagcctgaacgaattttttcacattctcagcatctttattgtcttcacgcgccacaatcaggttcacgtaaggagactctttaccttcaacaaagatgccgtctttcgccggggtcaggccaatctggctggcgtaagtggtgttgataacggccagcgcaatctgcgcatcgtccagggaacgcggcagctgcggcgcctccagttcaacaatcttcaggtttttcgggttctcgacgatgtccagcgaggtcggcagcaggcccacgccgtctttcagtttaatcagacctacctgctgcagcagcagcagggaacgaccgaggttagtcggatcgttagggacggcgatctgtgagcccggctgcagttcgtccagcgatttgattttcttcgaataacccgcgatcgggtagacgaaggtgttaccgacagccaccagcttatagccgcggtctttaatctgctgatcgagatacggtttatgctggaaggcgttcacgtcgatatcgcctttgctcagcgcttcgttcggcagaacgtaatcgttgaaggtcaccagttctacgtcaaggccatacttctcttttgctactttctgcgcaacttcagcgacctgctgttccgccccgacgataacgccgactttaatatgattcggatctttttcatcctgaccgcaacccaccagcgccagagaaccgattaacgcgccaactgccgcaaaagttttgaaattaaaggccatgttatttccttcctgtaagaatgagtgttgtctgccaataacgttatttgtgagtcacagcccggacgatgcgatcgccagagaattgaattaaataaaccagaacaaccagcaataccagtacggtattcatcacggtggcgttatatccaatatagccatactgataaccaatctgacctaggccaccggcgcccaccgcgccgcccattgcggaataacccaccagcgtgatgagcgtgatggtggcggcgttgaccagacccggcaatgcttcaggtagcaggactttgcgcacgatctgcagcggcgtggcgcccatcgcgcgggaggcttcaataaggccggtggggatctccagcagggcgttctccaccatgcgggcgataaacggcgcggcgccaactgttaatggcacaatcgctgcctgcaggccgatagaggtaccgacgatcacgcgggtaaacggaatcatccagaccagcaggataatgaacgggatggagcggaaaatattcaccagcgccgacagcgtacggtacagtttggcattggcgacgatttgccccggacgggtaacgtacagcagcacgcccaccggcaggccgaggacaaaaccgaagaagccagagacaaaagtcattgccagcgtttcccatacgccgcgcaacagcagccacatcattgcctcagacataacccaatacctctacttttacatgatgttcctgcagccaggcgatggccgcctgagtgtcttcctgtgtaccgtgcatttcggtgagcatgatgccgaacttcaccccgccggcataatccatctgcgcgctgataatgttgttattcacattgaagcgacgcgcggtttcagagagcagcggcgcatcgacggagtggccggtaaattccatgcgcagcatcggtacgctatccgctgtggcggtaggtttcaggcgcgcctgatagtcatccggaatatcgaggtgcagagtggactgaataaactgctgagccagcggcgtcttcggatgggagaagacttcgctcacggtgtcctgctcgatcaattgaccattactaatgaccgccacgcagtcgcagatacgtttaaccacgtccatttcatgggtgatcaacaggatagtcaggcccaggcgacggttaatgtctttcagcagttcgagaatggaacgggtagtggccggatccagggcgctggtggcttcatcgcacagcaatactttaggattgctggccagcgcgcgggcaatcgccacgcgctgtttctggccgccggagaggttggccgggtagctgtcgtgcttatcacccaggccgacaagctccagcagctccgtgacacggcgtttgatttcagcctgcggcgtgttatccagctccaggggtaatgccacgttgccgaaaacggtccgcgaggccaacaggttaaaatgctggaaaatcatgccaatttgacggcgagcgcgggttagctctttctccgacagggcagtcagttcctgaccgtcaacctgtacgctgccctcggtcgggcgctccagcaggttcacgcagcgaatcagcgtacttttaccggcgccggaggcaccgatgacgccgtaaatctgtccggcagggacatgcaggctgacgttattcagcgcctgaatgctgcgattcccctgctggaatactttggtgatattggaaagtttaatcatcagttatttattatcgtttagccgtttgccgtggcattttcttctgccgtatccaggcgatgcctggcaatgaaatggatgttaaggcatccagacgtctaaatcaatctgactctttataatgagcactttcttgcatgcggaaacatgcgatactagcggcactagtctttttcaggagcaaaccggtggcaaagtcagtacccgcaatttttctcgaccgtgacggcactattaatgtcgatcatggctacgtccacgaaatcgacaattttgaatttatcgatggcgtcattgacgcgatgcgcgaactaaaagagatgggctacgcgctggtgctggtcactaaccagtccggtattgcccgcggtaaatttaccgaagcccagtttgaaacgctgaccgaatggatggactggtctctggcagaccgcggcgtcgacctcgacggtatctactattgcccgcatcacccgcagggtgcggttgaggagtaccgtcagacctgtgattgtcgtaaaccgcatccggggatgctgatttccgcccgcgattatctgcatatcgatatggctgcttcttatatggtaggggacaaactggaagatatgcaggcggcagcggctgcggatgtcgggactaaagtactggtgcgcaccggtaaacccctaactgaagaagcggaaaaagcggcggattgggtgctaaatagcctggcagagctgccggcggcgattaaaaagcagcaaaaataagcgttgcgtttaaaagatgagcggttgaaataaaattgtatttttccgcttgtcattcccggagagctccctataatgcgcctccatcgacacggcggatgtgaatcacttcacacaaacagccggttcggttgcagagaaaaatcctgaaaaacgggttgactctgaaagaggaaagcgtaatatacgccacctcgcgacagagcgctaaagcgcgtcgcaactgctctttaacaatttatcagacaatctgtgtgggcactcaaagtgacatggattcttaacgtcctcggacgaaaaatgaataccaagtctcaagagtgaacacgtaattcattacgaagtttaattctttgagcatcaaacttaaattgaagagtttgatcatggctcagattgaacgctggcggcaggcctaacacatgcaagtcgagcggtagcacagagagcttgctctcgggtgacgagcggcggacgggtgagtaatgtctgggaaactgcctgatggagggggataactactggaaacggtagctaataccgcataacgtcgcaagaccaaagtgggggaccttcgggcctcatgccatcagatgtgcccagatgggattagctagtaggtggggtaacggctcacctaggcgacgatccctagctggtctgagaggatgaccagccacactggaactgagacacggtccagactcctacgggaggcagcagtggggaatattgcacaatgggcgcaagcctgatgcagccatgccgcgtgtgtgaagaaggccttcgggttgtaaagcactttcagcggggaggaaggcgttaaggttaataaccttggcgattgacgttacccgcagaagaagcaccggctaactccgtgccagcagccgcggtaatacggagggtgcaagcgttaatcggaattactgggcgtaaagcgcacgcaggcggtctgtcaagtcggatgtgaaatccccgggctcaacctgggaactgcattcgaaactggcaggctagagtcttgtagaggnnnnngaattccaggtgtagcggtgaaatgcgtagagatctggaggaataccggtggcgaaggcggccccctggacaaagactgacgctcaggtgcgaaagcgtggggagcaaacaggattagataccctggtagtccacgccgtaaacgatgtcgatttggaggttgtgcccttgaggcgtggcttccggagctaacgcgttaaatcgaccgcctggggagtacggccgcaaggttaaaactcaaatgaattgacgggggcccgcacaagcggtggagcatgtggtttaattcgatgcaacgcgaagaaccttacctggtcttgacatccacagaactttccagagatggattggtgccttcgggaactgtgagacaggtgctgcatggctgtcgtcagctcgtgttgtgaaatgttgggttaagtcccgcaacgagcgcaacccttatcctttgttgccagcggtccggccgggaactcaaaggagactgccagtgataaactggaggaaggtggggatgacgtcaagtcatcatggcccttacgaccagggctacacacgtgctacaatggcatatacaaagagaagcgacctcgcgagagcaagcggacctcataaagtatgtcgtagtccggattggagtctgcaactcgactccatgaagtcggaatcgctagtaatcgtagatcagaatgctacggtgaatacgttcccgggccttgtacacaccgcccgtcacaccatgggagtgggttgcaaaagaagtaggtagcttaaccttcgggagggcgcttaccactttgtgattcatgactggggtgaagtcgtaacaaggtaaccgtaggggaacctgcggttggatcacctccttaccttaaagaacctgcctttgtagtgctcacacagattgtctgatgaaaatagagcagtaagtaatctctgcaggcttgtagctcaggtggttagagcgcacccctgataagggtgaggtcggtggttcaagtccactcaggcctaccaaatttgcgaagcaaatttgaagaggttgcaaacgatggggctatagctcagctgggagagcgcctgctttgcacgcaggaggtctgcggttcgatcccgcatagctccaccatctttactgcgaacacaagaaaacttcagagtgaacctgaaaaggtgcactgcgaagttttgctctttaaaaatctggatcaagctgaaaattgaaacgacacacagttaatgtgtgttcgagtctctcaaattttcgcaatcagaagtgaaacatcttcgggttgtgaggttaagcgactaagcgtacacggtggatgccctggcagtcagaggcgatgaaggacgtgctaatctgcgaaaagcgtcggtaaggtgatatgaaccgttataaccggcgatgtccgaatggggaaacccagtgtgattcgtcacactatcgttaactgaatacataggttaacgaggcgaaccgggggaactgaaacatctaagtaccccgaggaaaagaaatcaaccgagattcccccagtagcggcgagcgaacggggagcagcccagagtctgaatcagcttgtgtgttagtggaacggtctggaaagtccgacggtacagggtgatagtcccgtacaccaaaatgcacaggctgtgaactcgaagagtagggcgggacacgtggtatcctgtctgaatatggggggaccatcctccaaggctaaatactcctgactgaccgatagtgaaccagtaccgtgagggaaaggcgaaaagaaccccggcgaggggagtgaaaaagaacctgaaaccgtgtacgtacaagcagtgggagcaccttcgggtgtgactgcgtaccttttgtataatgggtcagcgacttatattctgtagcaaggttaaccgtataggggagccgcagggaaaccgagtcttaactgggcgttaagttgcagggtatagacccgaaacccggtgatctagccatgggcaggttgaaggttgggtaacactaactggaggaccgaaccgactaatgttgaaaaattagcggatgacttgtggctgggggtgaaaggccaatcaaaccgggagatagctggttctccccgaaagctatttaggtagcgcctcgtgaactnnnnnnnnnngtagagcactgtttcggctagggggtcatcccgacttaccaacccgatgcaaactacgaataccgaagaatgttatcacgggagacacacggcgggtgctaacgtccgtcgtgaagagggaaacaacccagaccgccagctaaggtcccaaagtcatggttaagtgggaaacgatgtgggaaggcacagacagccaggatgttggcttagaagcagccatcatttaaagaaagcgtaatagctcactggtcgagtcggcctgcgcggaagatgtaacggggctaaaccatgcaccgaagctgcggcagcgacactatgtgttgttgggtaggggagcgttctgtaagcctgcgaaggtgtgctgtgaggcatgctggaggtatcagaagtgcgaatgctgacataagtaacgataaagcgggtgaaaagcccgctcgccggaagaccaagggttcctgtccaacgttaatcggggcagggtgagtcgacccctaaggcgaggccgaaaggcgtagtcgatgggaaacaggttaatattcctgtacttggtgttactgcgaaggggggacggagaaggctatgttagccgggcgacggttgtcccggtttaagcatgtaggctggttgtccaggcaaatccggataatcaaggctgaggtgtgatgacgaggcactacggtgctgaagtaacaaatgccctgcttccaggaaaagcctctaagcatcaggtaacatcaaatcgtaccccaaaccgacacaggtggtcaggtagagaataccaaggcgcttgagagaactcgggtgaaggaactaggcaaaatggtgccgtaacttcgggagaaggcacgctggtgtgtaggtgaagtccctgcggatggagctgagaccagtcgaagataccagctggctgcaactgtttattaaaaacacagcactgtgcaaacacgaaagtggacgtatacggtgtgacgcctgcccggtgccggaaggttaattgatggggttatccgtaaggagaagctcttgatcgaagccccggtaaacggcggccgtaactataacggtcctaaggtagcgaaattccttgtcgggtaagttccgacctgcacgaatggcgtaatgatggccaggctgtctccacccgagactcagtgaaattgaactcgctgtgaagatgcagtgtacccgcggcaagacggaaagaccccgtgaacctttactatagcttgacactgaacattgagccttgatgtgtaggataggtgggaggctttgaagcgtggacgccagtctgcgtggagccaaccttgaaataccaccctttaatgtttgatgttctaacgttggcccctgaccggggttgcggacagtgtctggtgggtagtttgactggggcggtctcctcccaaagcgtaacggaggagcacgaaggttagctaatcctggtcggacatcaggaggttagtgcaatggcataagctagcttgactgcgagcgtgacggcgcgagcaggtgcgaaagcaggtcatagtgatccggtggttctgaatggaagggccatcgctcaacggataaaaggtactccggggataacaggctgataccgcccaagagttcatatcgacggcggtgtttggcacctcgatgtcggctcatcacatcctggggctgaagtaggtcccaagggtatggctgttcgccatttaaagtggtacgcgagctgggtttagaacgtcgtgagacagttcggtccctatctgccgtgggcgctggagaattgagggggctgctcctagtacgagaggaccggagtggacgcatcactggtgttcgggttgtcatgccaatggcactgcccggtagctaaatgcggaagagataagtgctgaaagcatctaagcacgaaacttgccccgagatgagttctccctgagactttaagtctcctgaaggaacgttaaagacgatgacgttgataggccgggtgtgtaagcgcagcgatgcgttgagctaaccggtactaatgaaccgtgaggcttaaccttacaacgccgaagatgttttggcggattgagagaattttcagcttagattcagagttgagtacgcaatataaagaattgcgtactgagcacaaagaatttgcctggcggcactagcgcggtggtcccacctgaccccatgccgaactcagaagtgaaacgccgtagcgccgatggtagtgtggggtctccccatgtgagagtagggaactgccaggcatcaaattgcagtaagccggggtgacaaccggtggtaataaagcgaagaaattcggtggagcggtagttcagtcggttagaatacctgcctgtcacgcagggggtcgcgggttcgagtcccgtccgttccgccacttattaagagccctgagcatttgctcagggcttttttgtttgatctgttctctattattgctaattcagcaaaaatcctctgcattaatcgctctttttcccctccacaccatcagccataatttcatccgttaaccgaaatgaagaaataacgaggaaaatcatggcaatccctgcatttggtcttggcaccttccgtctgaaagatgatgttgttatcgcatccgtaaaaaccgcgctggagctgggctatcgtgctatcgacaccgcgcaaatctatgacaacgaagccgcggtgggtcaggctatcgccgaaagcggcgtgccgcgtgatgagctgttcatcactaccaaaatctggatcgagaacctgagcaaagacaaactcatcgccagcctgcaagaaagtctgcagaagctgcgcacggactatgttgacctgacgctcatccactggccgtcaccgaacgatgcggttgccgttgaagagtttatggcagccctgatggaagcgaagaagctgggtctgacccgtcagattggtatctccaacttcactattccactgatggagcgcgcgattgccgccgttggcgctgaaaacattgcgaccaaccagattgaactctcgccgtatctgcaaaaccgtaaagtcgtcgactgggcacgtgagcacggcatccacatcacctcttacatgacgctggcttatggtaaggcgctgaaagatgaagtgattgcccgtatcgcggcgaaacataatgcgactccggcgcaggttatcctggcatgggcgatgggcgaggggtacgcggtgatcccgtcctcgacgaagcgtgataacctggccagcaacctgaaggcgctggatctgcagttggatgatgaagatcgacaggcgatcgctgcgctggattgcaacgatcggctggtgagcccggaaggtctggcgccgcagtgggattaatcactcgctaccggtatgccgttcgccctgccgcccgagaaggtattacgacagctccttcgggagctgttttacgtggtcgctcagaaaatcaataaatgccctgatgcgagtgctgaccgcccggtcgctgtaatagacggcactgaaaggcatttccaccggtaagcgcttatcggccagtagctcgacaaactctccgctggcaatctctttatccaccatgtaatccgacaggcaggcaataccgttgccggtcaggcacagctgcttgagcgtttcgccgctattggatgacaccgccgcttcgatctctaacagctggccatcgcaacaggagaccggccaggtattcagcgataccggctcggtgaagccgaggcagtgatgctgtttcagatcggatggatgctgcggcataccgtagcgcgcgacatagtcgggcgaggcgacgatcttacgatagctggtaaacagcggtcgggcgcgcaggctggaatccgttaaggtcccggcccgaatggccacatccactttccgttcaatcagattgataaacgtctcagacgagacgagcgacagcgtcatttccgggtagcgttcgcgaaatggcttcaccagcggcatgagaaaatgcagcatcaccggcgtcgcggcatctacccgcagcaggccccgcggcgtcgtgcgcgtctccagcagatcgttctctgccgccgccatttcctgcaagaccacctgcatccggcgaaaatagcgctcgccttcttctgtcaggctgagctggcgggtggtccgattgagcaggcttacgcctagctttgattccagctttttgaccgcccggctgacggcggagttggcctgtccgagctgctcggccgcccggctgaaactcccgctttccaccaccgccacaaagatggcgatctcctctgatgtggctctcattattgcacctatagcaaaattctattgatactttgatagtttttgttatttatacaacccttcatactacgtgtcatcttaatcctgatgctacggagtaaattatgccactggcgctatttgccttaactatcggtgccttcgcaattggcaccactgaatttgtgattgtcggcctggtcccgaccatcgcccagcaactctctatctctttgccttctgcaggactgctggtctctatctacgcgctgggcgtagctatcggcgctccggtgctgacggcgttaacggggcgtatgccgcgtaaacagctgctgctggcgttgatggtcctgtttacggcgggtaatgtgctggcctggcaggccccgggctatgaaacgctgatcctggcgcgactgctgaccggcctggcacacggcgtgttcttctctattggctcgacaattgctaccagcctggtggcaaaagagaaagcggcctcggccatcgccattatgttcggcggcctgacggtcgcgctggtgaccggcgttccctttggcacctttattggccagcatttcggctggcgggaaaccttcctcgcggtatcgattctcggggtgattgcgctaatcagcagtctgcttctggtgccgaataatattccgggccgcgccagcgccagcctgcgcgatcagctgagagtattaacccatccgcgcctgctgatgatctacgccattaccgcgctgggctatggcggcgtgtttaccgcttttaccttccttgcgccgatgatgcaggagctggccggcttcagcccgtcagcggtgagctggatcctgctgggctatggtgtctcggtggctataggtaacgtgtggggcggcaaactggccgataagcatggcgccgtctccgcgctgaagtttatcttcgccgcgctggtgctactgctgctggtcttccagctgaccgccagcgttcactatgccgcgctggcgacagtgctggtgatgggcgttttcgccttcggcaacgtgccgggtctgcaggtctatgtggtgcaaaaagcagagcagtataccccgggggctgtcgacatcgcttccggcctgaatattgccgccttcaatatcggtatcgcgctggggtcgatcgtcggcggacagacggtcgaacggtacggtctggcgcagacgccgtggattggcgcgatgattgtgctggtcgctttgctgttggtggtcctgagcggacgtttagataaattgccacgccgttcggcagcgctttctcccgaaggctaagggtttctcgcaatttgcattgaaagtgtatgggaaaatccctataacagaataaccagtcgtcgtcgggctggtttctgttatcgaggattaatgcccaaattgcgaaagaacacctacgccatgcgctatgtcgccggacaacctgcggagagaatattgcctccgggggcgtttgcgggcgtaagtccggtttatcccgccggtacgccattaagcagcgatgagaagatccgcgtgctggtatggaatatcttcaagcagcagcgcgcagagtggcaatcggtccttaaaaatttcggcaaagatgcgcatttggtcctgttgcaggaggcgcaaaccaccccagaactggtccggttcgcgacttcaaactatctggccgccgatcaggtgccggcgctggtattgccgcagcatccttccggcgtaatgacgctggcctccgcgcaccccatctattgctgtccgctgcgcgagcgcgagcctattttgcgattgccgaaatcggcgttagtgaccgtttatccgctgccggatgcgcggttgttgatggtagtcaatatccatgccgtcaactttagccttggcgtcgacgtctacagcaaacagctgctgccaattggcgatcagatcgcccatcacagcgggccggtgatcatggccggcgacttcaatgcctggagccggccgcggatgaatgcgctgtaccgctttgcgcgtgagatgtcgttacgcgaagttcgtttctcagacgatcagcgccgccgcgcgtttggtcgtcccctcgattttgtgttctaccgtgggttaagcgtgcacgatgcttccgtgctggtgacccgcgcctccgaccacaacccgctactagtcgaattcagtcccggcaagcctgattaatttaaggttggtcaggcctgccatggggcaggcctgcgcatgcatggtgctgccttttattactcaaaaaaaaccgtaaggacaagacaacatgacaacacgctctcaccatgacaacgtcgaaaagcagttcggctcccaggccagcgcctatctgaccagcgccgtacacgcctctggtcgcgatctgcagcggctggcggaacggctggctgattttcctcaggcgaaagtgctggatatgggctgcggggcagggcacgccagctttaccgcggcgggacaggttgccgaggtgaccgcctatgatttatcgagccagatgctggaggtcgttgccgccgcggcaaaggagaaaggttttagcaatatcgtgacccagcaggggtacgccgaaacgctgccgttcgctgatgccagctttgatgtggtgattagccgctactctgctcaccactggcatgacgttggccaggcgctgcgtgaggtgaaacgtgttctcaagccgggcggggtgattatcgtgatggacgtgatgtcgccgggtcatccggtacgtgatgtctggctgcagacggtggaagccctgcgcgacacctcgcatgtgcgtaattattccagcggcgagtggttgacgctggcgactgaagcggggctggtggttaaccagttgttgaccgatcgcctgccgctggagttcagttcatgggtggcgcggatgcgtactcctgagccgctggtggaggcgattcgcttatatcagcagagcgcttcggcggaggtcaaagcgtacttcgagttacaggaggacggatcgtttaccagcgataccattctgttcgaagcgcataaagcggtttaatttaggcaacaaaaaaggcaccggggaagtcggtgcctttttgtcgaaccagaggtatcaggactctggtcgatcgctgtttttcacaaacaacgttagctgatcgcctgggcgcaggttgtcggtatcgctgttccagcgcatcacgtcgcgaatattaacgccgtgacgtttggcgatgctcgacagcgaatcgcctttacgaacgcgataggtgatgctatcgctgttgttcgccagacgctgggcgctgctgcctgcgccaataaccagattctgcccaacctttaatccagagccgcgcaggttattccactgctgcagatcgcgggtcgtcacaccaagacgggaagcaatcccggaaatggtgtcgccggaacgcaccttatagctacggctggttagcggcgtattgtccgcgagctgcgtcggctgcacggcggcaatgtcgccagaggccagcgattcacgcagctgtgcggcgtgcttctgcggcaccatgacgtactttggcccgctcgcgcccagcgttgacccttttacgcccgcattgaacgtcttcagcttgctgaccggcataccggccatgtccgcgagctgagaaatatcaaccggactgtcgaggcgaacgcgcgccagcgcacggctttcatcagccgtaggcagctttacgccgtaacgtttgctgtttttgagaatgtcgctcaatgccagcattttcgggacgtagattttcgtttcatgcggcagagacagcgaccagaaatcggtgggtttgccacgcgaacggttcgcttttactgccttcatgacccggccttcgccgctgttataggctgcgaccgttaacaaccagtcgccgtcgaacattttgttcagacgttgcatcatgtccagcgccgcggtagtagacgcgacgacatcacgacgcgcatcgtaactgcgggtctgttttaaaccataattgcgccctgtgctcggaatgatctgccaaatgcctgcggcattggcgccagacgtcgcgtgtgggtcaaaagcgctctccactatgggtagtaataccagttccattggcatgttacgtttcttaacctgcccggctatccagtacatatacggctctgcccgtaaagttacatcgtggagatagctcttatttcttaagtacttctgtttctgttcgcgaatccggggattatccggtattcccatctttagctcgtcgcctatggaagtccacagatcctggtcttgcgcgtagaaggttccatcatctaaccagcgcgcttgacttgtgaacttgcctgcttccccttgaccagccgcagaaaggctctgtgctcgctgttcgacggtgccatcgtgcttagacgcctggcaccccaccagcaggacagaggcgagtaatatcgctcgtgccttcatgtgtgtgtcaatagttgcttaaaagacgaccaaggataacggcgaagttggccgatgacaagaattaaatatcagaagtcatctttctttgaccttaaccatgcaaatcgcgccacagagtgttgcaaatttgtttctttgttaattttgtcaattaaatcaatatcatttacgcgtaaaaataaatttatacgccgctcatttttcagagttacgggtagtgttttttgtttttttgcacgtaactcattaactttatgatagtaatcgtttatgtccctatcatctggcaggatactcaatgcaaacttcatattcgctaacgtatattcatgtgcgcaacatatgagggtttcttcaggaagggcattaattttcataaatgattgatacatctgctctgctgtaccttcgaacagccttccgcagccgccggaaaacatcgtatcgccacagaacagataaggttcgctgtagtaacagatatgtcctaatgtgtgacctggcgtagagaaaatggaaaaatcgtgcccgagaattgacagccgatcgccatcgcctaccacctgagtgacgcctttatcctgggtttccgccggcccgtaaaccactatagaagggaatttttcacgtaattgttttacgccgccgacgtgatcctgatgatgatgggtcaataaaatagcctcgggctgccactggttttcctcgatggccgccagaaccggcgcggcttcgcctggatctacgatgatgcaggggccgttattctcactgagaacccagatgtagttgtcctgaaacgcgggaatactgataagattcataaattacctctaaagcgtagcggaaggtggcaatgaagccggcaaggatacctcacacagtgacagcgcctgagcattggtccagtatgccgtggggcgaatactatcgcgaaacgctggagcagcagatgaaaccgtggctggctaaattatatggctttcatctgcttaagattggcaatctgagcgcggaaatcaataccgaagcttgcgccatctcgcaccaggtgaatgtctcgctggcgggaaatccaatgcaggtccgggctgacccgctgcatttaccctttgccgaaaagtccgttgacgcctgcctgctggcgcacaccctgccgtggtgtagcgatccgcatcgtctgctgcgggaagccgatcgtgtactgatcgatgatggctggatgatcctgaccgggtttaatccggtcagcctgatggggttgcgtaagctggtgccggtcctgcgcaaaggaacgccttataatagccgtatgtttacgctgatgcgccagctggactggctggcgctgctcaactttgaagtgctgcactatggacgttaccaggttttgccctggtcgcgccatggcggcaaattgttgagcacccatctgccggcgctgggctgtttgcaattgattgtcgcccgcaaacggaccattccgctgacgctcaatccgatgaaatccggcaaagcgaaaactcagctgcggccggcggtgggcgccacccggcagtggcgcaaagggcagaattaactctcaggcaggtagccgacatcgtccagtgtggggtgggaggccgccgcgcgcgccagctcgtcgcagcgttcattttcaggatggccggcgtggccctttacccattcccatttaattttatgctggccaagcgcggcgtccagccgctgccagaggtcgacatttttcaccggctttttctctgccgttttccagccgcgctttttccagttgtggatccactgggtgatcccctgacgaacatactggctgtcagtgctgagcaccacttcgcaatgctcttttaacgcttccagggcaacaattgccgccatcagttccatgcggttattggtggtcagacggtagccagcgctgaaggttttttcgtgctggcggtagcgcatgatggcgccgtagccgccaggtcctggattacccaggcaagagccgtcggtgaaaatttctacctgtttgagcatctctggtagacttcctgtaattgaaatcgatttgtaaacgataagtctgacataaatgaccgctatgagcactgcaattacgcgccagattgttctcgataccgaaaccaccggtatgaaccagatcggggcacactacgagggacacaagatcattgagatcggcgccgtggaggtgatcaaccgccgcctgaccggtaacaattttcacgtctatctgaagcccgatcggctggtggatcctgaagcattcggcgtacacgggatcgccgatgagttcctgctggataaacctacctttgccgacgtggctgatgagtttatggattacatccgcggcgcggagctggtgatccataacgcctcgttcgatatcggctttatggattatgaattcagtaagctaaaccgcggcatcggaaaaaccgagaccttttgtaaaatcaccgacagtttggcgctggcgcggaaaatgtttccaggcaagcgcaacagcctcgatgcgctatgttcgcgttacgaaatagacaacagcaagcgtacgctgcacggggcgttgctcgatgcccagatccttgccgatgtctatttgatgatgaccggcggccagacttcgatggcgttctctatggaaggcgaaagccagcagcaggcgggagagatgggaattcagcgcgtcgtccgcgccggcagtcagttacgcgtggtttatgcctcagatgaagaactggcgaaccatgaatcccgcctcgacttggtacaaaagaaaggcggaagctgcctgtggcgtgcctgatagccactaaaatgaattaaaaataggcggttgggtgatttttgcagcaaacgattcaaaatggtagaaaaagcgttgacggggtagaggggaatccgtaatattcgcctcgttcccaacggaacaacaacgcggagcggtagttcagtcggttagaatacctgcctgtcacgcagggggtcgcgggttcgagtcccgtccgttccgccactattcagaaagcctgagtcagcaatgattcaggctttcgtcgttttcgtcgccgaatttcagcgcgcctcttgttcctcctgcatgcactgcataaatacccgcatcgccggactgatagccttcccggcatggtgggcgcagagcgcatggatcgtcaacggcgtctcgctgaatggcagctcaaccagcgtcccgcgcttgagctcgtcctccaccgcaaagcgtggcagaaaactcactcccagatttcccgccacgcactgcttgatactctcaatactccacagctcaatggtgttctccagagtaatttcgcgctggcgcagggtgctttcaaaaatctgccggaacacgcactggggttcgttgatgataaagctcagcgggatatgctgccgcgggcgcatgaagtctaccggcgcctgctcgaccgatgcgaccagcgtcagcgactgctggccaagctccattatcgtgagcgcgtcatcgttacccacccggtaaaacacacccaaatcgacctcgtcggcaagcagcgcatcgcggatgctgtagcagttgagcgactgcagcgacaggcgcactttcggagcgcgttgcttaaaacgctgcagcacccgcggcattttatacgccagcagcgtttcgccagtggcgacgcgaagttcgccgccgggctcatcgtcctggcgtgccgcctgacgaatcgaggccatcactttagtcaggtcgtagacatgcggcaggagcttcttaccggcggcggtgagacacatccgccggccgattttctcaaacagcgggatggcaagctcctgctccagctgctggatatgaaaagtcacggtggactgagtgcagcatagtttctgcgccgcgcgcagaaaggaaccttcttcgacaacagttttgaaggtgatgaagcgtcgcagatccatatttcctctttgtatcgatgttatcgaagcgagaatgaaaaaatattcatttttttaaattatcagcttcgggtagtgtctgccagacaagaggagaaaacccgtgacacctaccctgattagcgcctttttaacttacactttgatcaccgccctgacacccgggcccaacaatatcctggcgctgagcagcgtcacctcccatggtctacgccgcagcctgcgggtgctggccgggatgagcgtcgggtttattatcactatgttgatttgcgcggctttaaccttttcgctggttgaactcgactcacgctttaccctggtattgggatggattggcgcggcgtacatcctgtggctggcctggcagattgccaaaagcaaaccggcgacagggatgccgagtgtagaaccggtaggcttttgggcgagtctggggctacagttcgtcaacgttaaaattattctgtatggcatcaccgcgctttctacctttgttctgcccgttactcgcgagcctgtttggcttatcagcgtgagtctgctgctggcggcgattggcgcactgggaaatctgtgccgggcgctggcggggcatctgtttcaacgcctgtttttgctgtacgggcggcaactgaactggatgctggctgcgttattggtctactgtgctgtgcggatcgtggtggaataaaaagggagcgcagcggctcccgaagggtgattagccgatcgtgaaaggatcggcatcgcgccaggcggggaatttttcacgatattcctgaagggcgctcagcgacagctcggcatcaagacgagtggcctgatgcggatcggcggtggcgataatctccccctggggattgataatccgactatcgccgcggtaatgatggccgttgccgtcagtgccaacccggttacagccggcgacataggcctggttttcaatcgcgcgggcgatcagcagcgactgccagtgcagcgagcgtggcgccggccagttggcgacatacagcgccaaatcatagtcgttctgattacgcgaccataccggaaagcgcaggtcgtaacagaccagcggcaggatccgccatccacgccattcaaagaccacgcgctggtttccggcctcatagtgatgatgttcatcggccatacggaacaggtgccgtttatcataatggtgcaccgtaccgtcaggctcgaccagcaggaagcggttaacagcgccgtgttcagtttgcagcgcagcgctgccggcaatcagcgcctgggattgcgcagcccgggcatgcatccactccaccacgtcggcctcgggtaaagactgttttgccgcttccatggcaaagccgctggtaaacatctctggtaaaacaatcacatcgcgcccggtgattccttccagttggcgatcaaaatggcgcaggttggcagggccgtccatccagaccagcggttgttgcaacagcgaaattttcaggccaggcacaatggtcaactccattctcatgagggggttaggttaactgtaacaccatatcagccgcgcggcggtccgcggaatattttgttaaaaaaatgctactgatggaaacgaaaggggaggagagggcgaaaaaaggcggggaaagttccccgcccggcgtgtgatgtggtagtggttttattatgcagcttcaactttacgaactttttccggcagctttaccggctttgtcgccagctcctctggcgcaaagtcgtcgacgttaatgctgcgcagacggctatgctctgcacgggtaagaatggcggcctcatcctgactgattaatcctttggccagcgcgttgtgggccagctcatccagacgggtgaacggcagatttttacccaactctttgcagatccgctggtggataggatcggccgccatcacttccagcagggcctcttccagcaggcctaccgggttatgctcgctcggcgtcagatactgaccgcggccgatgcgggagcgcgtggcgctgggcacctgcagaattttggcgacctggtggtccagcctatccgacggcgcatgatgatgacggccggtcgggaagatgaccaggcgcattacgcctgccaccagacggttcgggaaattgtccaacagatcgtcaatggcttgctcggcctggtgcagcgcgtcctgtaccccccagtgaaccagcggcagatcggcttcattgcgtccttcatcgtcatagcgtttcagcaccgccgaggccaggtacagctggcttaacacatcccccagacgggcggagatacgttcgcgtcgcttgaggctgccgccgagcaccgccattgagacgtctgacagcagtgccaggttggcgctcagacggttcatttgctgatagtagcgacgggtggcgtcacgggtcggcgcgctgctggtgcgcccgccggtcaggcccagccagaaactccgcactttattactgccgacatggccgatgtgtttgaacagcagcttgtcataggcgttcaggtcattattctgcgcggcggccatctcctccagtacgtacggatggcagcgaatcgccccctgaccgaagatcatcatgctgcgggtcaaaatgtttgcgccttccacggtgatggcgataggcgcgccctgataggcccgggcgaggaagttgccttcgcccagcataatgcctttcccgccggtaatatccatcgcgtcgataatggagcgctggccgcggtgggtgcagtgatatttcacgatagcggacagcactgcaggtttctcgccgagcatgatgccgtaggtgatcagcgacgccgcagcgtccatcacataggcgttaccggcgatacgcgccagcgcctcttcaatcccttccattttgccgatggagattttgaactggcggcgaatatgggcgtaagcgccagtcgccatggcaacggatttcagaccaccggtggcgttggacggcagagtaataccgcggccgaccgatagacattcaaccaacatgcgccagccctgaccggccatgcttgggccgccgatgatgtaatcgataggcacgaagatatctttgccgcgggttggaccgttctggaacggcacgttcagcgggaagtggcgacggccgatttccacgcccggggtggaggtggggatcagcgcgcaggtgatacccagctcttcttctccgcccagcaaacgatccgggtcagagagtttgaaagccagccccagcacggtggcgataggcgccagcgtgatataacgtttgttccaggtcaggcgcatccccagcacctgttgaccctgccagtcgcccatgcacaccacgccggtatccgggatggcgccggcgtcagagcccgcttccgggctggtgagagcgaagcaagggatttccaggccgcgtgccagacgcggcagataatgattcttctgttcttcggtaccgtaatgctgcagcagttcgcccggacccagcgagttcgggacgccgacggtgatcgccaggatgccggagacgccagagagtttctgcagtactcgtgcctgagcgtaagcggagaactcaagtccgccatactctttcttaatgatcatcgcgaagaagcggtgctctttcagataggcccacagctccggcggcaaatcggccatttcgtgggtgatggcgaagtcgttagccatccggcaggcttcttcaactgggccgtcgaggaaagcttgctcttcggcggtcagccgcggctgcggatagttatgtaacttttgccagtcaggattgccgcgaaacagatcgccttcccaccaggtggtgccggcgtcgatggcttctttttccgtgcgcgacatcggcggcatcaccttgcggaatgtgcgaaacgccggtgcggaaatcatggatttacgcataggcgcaaagttaaacggcaacagtatgatcgccagcggcagtagcagccagatattccacactccggccgcgccgagcgccgcggtccaggcgagcaaaatcacgctgctgagcagcaggctgacccggtgatagaagagcgcgccgagtaaaacgacggttgcaacaatactcaaaatcatcatagagaaatgctccctgagcttgtaggaggtctgaccacttgtgatgtattggttgtagtgcatgcgtttttatttagcaatgtgtttacaaaataattacaaccttgctcacattgttgtatgcaaaagcggcacataaaatcaaaagagcgagggataacgctgcctgctgcttctcgcttcgacggctatccggtacactgccggggttattccactcatactgaaggattatcctcatgtaccaggatcttattcgtaacgaactgaacgaagccgcggaaacgctggctaactttctgcaggacgaagccaatatccatgctatccagcgtgccgctgtcctgctggcggatagctttaaggcgggtgggaaagtgctgtcctgcggtaacggcggttcccattgcgatgcgatgcattttgcggaagagctgaccggacgttatcgcgaaaaccgcccgggttacccggccatcgcgatctccgacgtcagccacctctcctgcgtgagcaatgattttggctatgagtatgtgttctcccgctacgttgaatccgttggccgcgcaggcgatgtgctgctcggtatctccacgtctggcaactccggcaacgtgattaaggccattgaggccgcgcgggcgcaggggatgaaagtgatcaccctgaccggtaaagacggcggtaaaatggccggtagcgctgatgtggaaattcgcgtgccgcactttggctacgccgaccgcatccaggagatccatatcaaagtgatccacattctgattatgctgatcgaaaaagagatggcgaaaggctaacaggcaggtgagtgtgtactgttgacggtggcctcgctccggcgccgtcgtgatttgtgagggtgaggtgatctatgtgcgaactgctcgggatgagcgccaatgtgccaaccgatatctgttttagctttaccgggctggtgcagcgcggcggcgggacggggccgcataaagacggctggggcatcaccttctatgaaggtaaaggctgtcgcacattcaaggatccccagccgagctttcagtcgccgatcgcgaaactggttcaggattaccccattaagtcctgttccgtcgtcgcccatattcgtcaggccaaccgcgggagggtggccctggagaacacccatcccttcacccgcgaactgtgggggcgcaactggacctatgcgcacaatgggcagctaaaaggctataagtcgctgaaaaccggtaattttcatccggtaggtgaaaccgacagtgaaaaagcgttttgctggctgctgcaccgtttaaccgagcgctatccgcgcacgccgggcaatatgctgggcgttttcaagtatatcgccaccctcgcgggtgaactacgtgagaaaggggtgttcaacatgctgctgtcggacgggcgctacgtaatggcgttctgctcgaccaatctgcactggatcacccggcgagcgccgttcggcgtggcaaaactgctggaccaggatgtggagatcgactttcaacgcgagaccacacccaacgatgtggtcacggttatcgccacgcagccgctgacggccaatgaaacctggcataagatcatgccaggcgagtgggcgttattttgtctcggggagcgtgtagtttgaggccagctgcggctggacaacttcgtggctgagcggcttgctcaccacatagcggccgtcggtcactgatacgaccggcggtttgtgggtctgctggaaatagtcatagcctggcttgagctgtttccagaaatccgcgtagtaggagtatttgtggcgttccatgttagcgttggtcatgcggaacggatagatactcacctgcacgcttggctggccgaagactaaggcgccggtcacgaactggaagatctcatcgataccgctgtcggtcatggcgtagcagccgactgagacgcagtcgccgtggatcatcaggtatttcccttcataaccatgggcgcgatcgtaggcgttcgggaagccgatgttaatcgctttatagaagcggctgtcgggtttgagctggctgcgggtgacgttatagaacccttccggactcttgaaatcgccctggcgctgtttcggaccgaggccaccggagtagttgcagatccggtagctgtcgaggagctggtaggtttcacccattttgacgtaaaggtcgagcatgcgctcttctttgaagatctcaatgtaaaccggtgaacccattaattgctgcttatattctttgctaaccggcgtcgtcgggctgttgctgctgagcagcccggcaaatgacacgcacggcaacagaagcatcgcaataaataatgcgattttgcgcatactgcttgttccttgataaaacaaaatagccacattgccaggacggcaagagagacccgaaatcagagttttctggatttagagcgctcacattagcatcacggcattttttcgcaagggcgacgtggcggcgtttacaaatcagcctcactttataccctgccagcgacgaaaacacagtgagaactttgcgcaatagctcgcattttagaagcacttatcgccccttgcgctacagccgccgctcacgaaatgttacacttgcgccggttcatcatcagagtaagaaaggatgcttctcttccgtcctgagcgctactggcgccgtttcgccctttcttctctgccattctgtcaataagctggccctgacctgcgtcggggttgaggttacggatacctgctaacgatatgattaaaatcacgaaagggctggatttgcccatagctggcatgccattacagcagatttctcccgcgccagcggtgaagcgcgtcgcgctactcggcgaagagtacgttggcatgcgccccgcgatggcggttaaagaaggcgatcgggtcaaaaaaggtcagatcctgttcgaagataaaaagatccctggcgtctgctttaccgccccggcgagcgggatcgtcagcgcgatccaccgcggcgaacggcgcgtgttgcagtcggtggtgattgatatcgagggcaatgacgcggtggcgtttacccgttacgccgcggacgcgctggccgaactgccgcgcgacaccgtacagcagcagctgctggcgtcgggccaatggacggcgctgcgtacccgaccgttcagcaaaacgccgctcccggggagcacgcccgccgctatctttgttaacgccatggacaccaatccgctggcggcggagccgcagccgattattctggccgaacgtgccgccttcgacgccggtcttaccgtgctcacgcgcttgaccgacgggaaagtgcacgtctgccagcccagcggcggcaagctgggcggtcatcctctcggccaggtctgtttcaatcagttcagcgggccgcacccggcggggctgccgggaacgcatattcactttctggagccggtgagcctgaataagcaggtctggcacctcaattatcaggacgcgatcgccattggtaagcttttcctcgacggggagctctactgcgaacggataattgcgctcggcggcccgcaggtaacatctccgcggctggtcaaaacgacgctcggcgccagcctggaggatctgctggcaggtgagttgcaggagggggaaaacagggtcatttccggctcggtgcttagcggcacccgcgcccatggccctcacgccttcctggggcgcttccatctgcaggtgagcgtggtcaaagaagggcgggaaaaagagctcttcggctgggtgatgccgggcaaagagaaattctcgattacccgcaccacgctgggccatttcttcaagcgcaagcgctttcatttttccaccgataccaacggcggcgagcgggcgatggtgccgatcggcaactacgagcgggtgatgcctctggatatcctgccgaccatactgctgcgcgatctgctggccggagacaccgacagcgctcaggcgctgggctgtctggagctggatgaagaagatctggcgctgtgcacctatgtttgccctggaaagtatgaatatggcccggcgctgcgcagcgtgttaacccggattgagcaggaaggataagagatgggcttaaagcacctgattgagaaacttgagccgcatttcacgcatggcggcaagctggaaaaatattacccgctgtatgaggcggcggcgaccatcttctacacgccgggccaggtaacccgcggcgcggcgcacgtgcgcgacgccatcgacctgaagcggatgatgatcctcgtgtggtttgccgtattcccggcgatgttctggggcatgtacaacgttgggctgcagaccattccggcgctgcacaagctatacggcgccgaacagctgcagcaggcgatcgccaacaactggcactacagcgtcgcccagtggttaggggtgagcttcagtgccgacgccggctggctgagcatgatgaccctgggcgcggtcttcttcctgccgatctatatcaccgtttttatcgtcggtggcttctgggaagtgctgttcgcgattgtgcgcaagcatgagattaacgaaggttttttcgttacctctattctcttcgcgttgattgtgccgcccacgctgccgctgtggcaggcggcgctggggatctccttcggcgtggtgatcgccaaagagattttcggcggcaccgggcgcaacttcctcaacccggcgctggcggggcgcgcgttcctgttcttcgcctatccggcgcagatttccggcgacctcgtatggaccgcggcggacggtttctccggcgccacgccgctctcccagtgggccagcggcggcggtgaagcgctggtgaacgtggcgactggcgtgccggtgagctggatggacgccttcctcggcaatattcccggctcaattggcgaagtgtcaacgctgatgatcttcatcggcggggcgatcatcctctttggccgcgtcgcgtcctggcgcatcgtcgccggggtaatgatcggcatgatcgccaccgccaccctgtttaacgttatcggctccgacaccaacccgatgttcgctatgccatggtactggcatctggtgctcggcggtttcgccttcgggatgatgtttatggcgacggacccggtatccgcctcgtttaccgataaagggaaatggagttacggcgtgctgatcggcgtgatgtgcgtgctgatccgcgtggtgaacccggcttatccggaagggatgatgctggcgatcctcttcgccaacctcttcgcaccgctgttcgattatctggtggtgcaggccaatattaagcggaggaagtcgcgtggctgagaagaaaagtaacgatagcatcggcaaaacgctgctggtggtgctggtgctttgtctggtctgctccatcgtggtggcgggctcggccgtggggctgaaatcccgccagcaggcgcagcgggcattggataagcagcgcaatatcctggcagtgtcagggctgatgcaccccgatatggatgcggatgcggtagcggacaccttcgcggcgcgcattaccccgcgactggtgaatctggccaccggcgaactgctggagaaagacccgggtaaatttaatcaggctcaggcgctgaaggatccgcagcagagtatggccctggatgccagtcaggatccggctggtataaagcgacgcagtaatctggcggaaatttacctggtgcgcgacgcgcagcagaagattgagcagttggtgctgcccatttatggcaacggcctgtggtcgatgatgtatgccttcgtggcgctggacgtcgatggccgcacggtaaaaggcattacttactacgatcagggcgaaacgccggggctgggcggcgaggtggaaaacccgaactggcgccagcagtttgtcggcaagcaggtgctggatgacaacggcatgccggcgctgaaggtggtgaaaggcggcgcgcgcgcaggcgatctccacgcggttgacggtttatccggcgccacgctgacgtccaatggcgtacagcatagctttgatttctggatgggcgaactgggctttggtccgttcctgaaaaaggttcgtgagggagagctgaataatggctgaacagagcgatatgaaagaggtgaagcgcgtgctggtggggccgctcatcgccaataaccccatcgccctgcaggtgctgggcgtctgctccgcactggcggtaaccaccaaactggaaaccgccttcgtgatgaccattgcggtgaccctggtgacggcgttctccagcatgtttatctcgatgatccgccaccatattcccaatagcgtgcgcatcatcgtgcagatggcgatcatcgcctcgctggtgatcgtggtggatcagctgctgcgggctttcgcctatgagacctccaaacagctgtcggtattcgtcgggcttatcatcaccaactgcatcgtgatgggccgcgccgaagcctacgccatgaagtcgccgccgctggcgagctttatggatggtattggcaacggtctcggctatggcgcgatcctgattatcgtcggcttcctgcgcgagcttatcggtagcggcaagctgttcggtatcacggtgctggagacggtgcagaacggcggctggtatcagccgaacggcctgttcctgctggcgccgagcgcgttcttcattatcggtttgctgatctgggccctgcgtagctggaagcctgagcagcaggaaaaggagtaatcggtgatggctcattacatcagcctgtttgtccgcgcggtgttcgttgagaacatggcgctggccttcttcctcgggatgtgcacctttcttgcggtgtcgaaaaaggtctccaccgccttcggcctcggcgtcgcggtgacggtagtgctggggcttgccgtgccaatcaataacctggtctataacctggtgctgcgcgacggcgcgctggttgagggggtggatctcagctttcttaacttcatcacctttatcggagtgatcgccgcgctggtgcagatcctcgagatgatcctcgataagtattttccggcactgtacaacgcgctgggcatcttcctgccgctgattgcggttaactgtgcgattttcggcggcgtgtcgttcatggtgcagcgcgattacaacttcccggagtccatcgtctacggcttcggctccggtattggctggatgctggcgatcgtggcgatggcggggatccgcgaaaaaatgaagtacgccaacgtgcccgccggtttgcgcgggttagggatcacctttatcaccaccggactaatggcgctgggctttatgtccttctccggcgtgcagctataagggcgaataagtatggaaattattcttggcgtcgtgatgttcacgctgattgtgctggtgctgtcggggcttatcctggcagcgcgctcaaagctggtgaacgcgggcgacgtggttattgagatcaataacgaagcggataaacagatccgcaccccggcgggtgacaaactgctgaacacgctgtccagcaacgggatcttcgtctcctccgcctgcggcggcggcggctcctgcggccagtgtcgggtaactgttaaagagggcggcggggatatcctgccgaccgagctttcgcatattaccaagcgggatgccaaagccggttgccgtctggcctgtcaggtggcggtgaagcagaacatgaagattgaactgccggaagagattttcggcgtcaaaaaatgggagtgtgaagttatctctaacgataacaaagccactttcattaaagagctcaagctgcggatcccggagggggaggtggtgccgtttcgcgccgggggctatattcagattgaatgcccgccgcataaagtggcctatgcagattttgatgttcccgatgaataccgttcagactgggataagttcaacctgtttcgctatgtctctgaggtgaaagagccgaccctgcgcgcctactcaatggctaactatccggaagagaagggcatcattatgctcaacgtgcgcatcgcgacgccgccgccgaaggtcccggatgcgccgccggggatcatgtcatcctatatctggtcgctgaagccgggcgataaggtgacgatttccgggccgtttggcgagttctttgctaaagaaaccgacgccgagatggtgtttatcggcggcggcgccgggatggcgccgatgcgttcgcatattttcgaccagctcaagcgcctgcacagcacgcgcaaaatcagcttctggtacggcgcccgttcgctgcgcgaaatgttctacgatgaggagtttgaacagctggcgcgcgacaatccaaactttaccttccacgtcgcgctctccgatccgctgccggaagataactggaccgggcataccggctttatccataacgttctgtacgagaactatctacgcgatcacccggcgccggaagactgcgagttctatatgtgtgggccgccggtaatgaacgccgcggtaattaagatgctcaaagatctgggcgtcgaggacgagaatattctcctcgacgactttggaggctgacgatgctgacggtatttatcgcgacctttgtgatttttgcgctggtgatcctcggcatgtcgctgggctacctggtgaagcgcaagagcatccagggcagctgcggtgggatctccgcgctggggctggagaaagtctgcgattgtccggaaccgtgcgacgcgcgtaaaaagcgcctcgcccgcgaggcgcagcgtcagcagcggcgtattttgtaatgcccggcggcgctgcgcatgccggacctgctgcttcagttttgtaggccgggtaaggcgccagccgccacccggcataaagcggctccgtgcccggcggcgctgcgcttgccgggtcagctgcttcggttttgtaggccgggtaaggcgccagccgccacccggcataaagcggctccgtgcccggcggcgctgcgcatgccggggctgctgcttcggttttgtaggccgggtaaggcgccaaccgccacccggcaacaacatgccagcaatgtgaggccgctttcgcggcttttttagccgttgactcccttactgccagcttttcgcctgcgccggagaatccaccatcaccccgtcggcgcccagttctatcgccgtgcggtagtcttccgcactgttgatgccgaagaagataatgtgcgctttatcctgcgagcggaagcaatccattgcctctttatcccaggtgagcgtcgccggggagatcccttcgccaagggtgaatttctccaccacctcgactttgcgcttcagctccagtccataccactgctcaccatcgcgttgactcgctggctggcactgatggctgagcgaaatattggcaagcctggtgcgggtttcactgcgagtgacaaagcgagggatggctggcggcagggcggcgatatagcggtcttcggtggaatagacccgcacgcgatcgaggctatcggtggtttttaacacttcaagcaggcgctggcccatcacggtcggatcggcatccggagatttgatatcgatatagaaaaaagtgtgcggccattgctgtaaaacgctttgcaaggtcggaatggtggcctgcttaccgcgccacgggtggctgtcatccccccatttccagccggcgtcgactttcgccagctcggcggcggtcaaactggaaactttgccctcgctattggtcaatgcggaaagatcgcttgaccggtagagcaccggtacgccgtcgcggcttaactgcaccgtgacccagatggcttcggcgttattctccagcgccagcttaatggccggcagggtattttccggcgcatcgccggtgccgccgcggtgggctatcagctgtggagcggcccaggcgctggcggtggccagcaggcaaagcgcggtaagtattttcttcatgattatatcttcctgatttatcttttaactcaatgaaaataaacataatttattgcagttttatgttttaaccgcttttttagccgatgaaataaaaaaagcataaaattcgcatctgtttttgctatgctgtatgggtatacagtgttgagtctgacgatgcgtaaaattatccatgtcgatatggactgtttctttgcggcggtggagatgcgcgacaacccagcgttgcgcgatattcccctcgcgataggcggcagtcgggtacaacgtggcgtgattagtaccgcgaactatcctgcgcgtaagtttggtgtgcgcagcgccatgccgacggcgacggcgctcaagctgtgcccgcatctcacgttgcttcccggccgcttcgatgcctacaaagaagcctcgaaccatatccgcgaaattttctcccgctatacctcgcgcattgagccgctgtcgctggatgaagcctatcttgacgtcagcgacagcgagcattgtcacgggtcagccaccctgatagcccaggagatccgccagaccatcgaacgggagttgcgcctcaccgcctcggcgggggtggcgccggtgaagtttctcgctaaaatcgcttcagatatgaataaacccaacggccagttcgttatcgccccccatcaggtggcagagtttgtgcgggcgctgccgctggcgaaaatacccggcgtcgggaaggtatcggcagcgaagctggaaaatatgggcctgcgaacctgtggcgatgtgcagaacagcgatctggccatgctgcttaagcgcttcggtaaattcgggcgtattctgtgggagcgcagccacgggattgatgagcgggaaattcataacgatcggcagcgtaaatcggtgggcgtggagcgcaccttagcggaagatatccatgaatggccggagtgcgaagcgattatcgaaaacctctatcccgagctggagaggcgactggcgaaggtcaaacctgatctgctgatcgcccgccagggcattaaactgaaattcaatgatttccagctgaccacccaggagcacgtctggccgcggctgaacaaagaggatctgatcgccaccgcgcacaaagcctgggatgagcgccgcggcggacggggcgtgcgcctggttgggctccacgtgacgttgctcgatccgcagctggaaaggcagcttttattagggatttagccatgcatattcgtgcttaccgcgacagcgatttgccactgctctgccagatctttctgcgcgcggtgcgggaaaccgccagtcgggactataccccggggcagatcgcggcctgggcgcaggtggatgagacgcgctggcgacaaaagctggccgactcaatcggcctggtggccgtggtcaacagccagccggttggctttatcaccgccattgggacgcatatcgatttgctgttcgtctcgccggatcgtgcccgccagggtatcggcggcgcgcttatcgaggcgctctgcgctcagtatccagcgcaaatcctgacggtggacgccagcattaccgcaaagccctgttttacggctcatggttttaaggtggtggctaagcagcgggtggcggcgcgcggggagtggtttattaattaccggatggaaaaacgcgtggcgctaaggtgatgcggggtaaaaccggcggcgggccgccgccggttgtggggcttatttagccggaatggctttcagcagctcggtcagcagcgtccagtactgaccgacgctctcgatatggacctgctcatccggggagtgcggaccggtaatggttggcccgatggagaccatgtccatctccggatacggttttttgaacagaccgcattccagaccggcgtgaatgatctggatgttcggcgtcttattgaacagacgctggtaagtctcgcgcaccaggtgcatcaccggcgaattggcgtccggttgccaaccagggtaggcgcctttggcttcggttttcgcccccgccagcttacccagagaatccagcatgctgaccacgtagtctttgccgctgtcgatcagcgagcggatcaggcagtggatctgtacgttgtcatcggtcatggtgacgacgccgacgttcagcgaagtttccacgacgcctttcgccacgtcagagttgcggataaccccgttcggcgtggcgttcagcagacggatgaaagtgtcgcgggaagcctgagtcagcgccgctttgtcgttatcgaccgcttccgcgagcaccaccaggttcttctctttggcctccagctcgtttttcagcagcgcctggtaagtattcaccagcgctttcagcgcatcggctttatccgcggcgacggcgacagtagcgtaagcttcacgcgggatggcgttgcgcaacgtgccgccgttgaaatcgaccagacgcagatccagctcatcggcgtggccggcgaggaagcgcgacagcagcttgttggcgttacccagaccaaggtgaatatcaccgccggagtggccgcctttcagcccttttaaggtgactttaaagctctggaacccggcgggaatcgcttcgcgggtcagcgccaggttagaggtgaaatcgatcccgccggcgcaacccatgtagatttcgccttcttcttcggagtcggtgttgatcaggatatcggcctgtagccagttggcctgcagaccgaacgcgccgtccatgccggcttcttcggtcatggtcagcagcacttccagcgggccgtgagcgacgctatcgtcggccagtaccgccagtgcggacgccattccgataccgttgtccgcgcccagcgtggtgccgcgcgctttcacccattcgccgtcaatgtacggctggatcggatctttaacgaagtcgtggacggtgtcgttatttttctgcggcaccatatcgaggtgcgcctgcagcgctaccggcttacggttttccataccggcagtcgcgcctttacgaatcagaatgttgccaacctggtcgcgttccgcatgtaagcctttttcttttgcccaacccataatgtgctcggcgagctgttcttcgtgataggacgggtgcgggatggagcaaatcttggcaaaaatatcccaaagcggctgcggggatagttgagacagttcagacacggtaagtctccttacagactcctgcatacagcggttgcaggacgagggttagcgttaaaatacacaacaagcccgggcttgcgcgatggggttgagaataccactttccaccgccgcaggtagtgtaaacaacgcaaaaagcgttgcgcaaaccgcttaacactggtttttagtgcgtcagatctctataatctcgcgcaaccattttccccctcgaacattatttaagccgtattacacaggctgggacacttcacatgagcgaaaaatacgtcgtcacctgggacatgttgcagattcacgcccgcaaactggccagccgtctgctgccggttgagcaatggaaaggcattattgccgttagccgcggcggactggtaccgggagccttactggcgcgtgaactgggcattcgtcatgttgataccgtatgcatctccagctacgaccatgataaccagcgcgagctgaaagtgctgaaacgtgcggaaggcgatggcgaaggctttatcgtcatcgacgatctggtggataccggcggtaccgccgtggcgatccgcgaaatgtatcccaaagcgcactttgtcaccattttcgccaagccggcaggccgcccgctggtggacgattacgttgtggatattccgcaggatacctggattgaacagccgtgggatatgggcgtggtgtttgtaccgcctatcgcaggtcgttaattcttcaggacagtgctatttaccacgcccggcttgccgggcgtggttttttttatcctttagcaggttacaatatccggagtggcactacgacggagactgcacatgtcacaggctaacctcagcgaaacgctgtttaaacctcgcttcaaacatcccgaaacttctacgctggtgcgtcggttttctgccggaaaaccccaggcgatgcagtcggcgctgagcggcaatcacgtcgatcactggtaccgtctgatcaaccgtttgatgtggatctggcgcggcgtaactccgcaggagatcctcgatgtgcaagcgcgcattgtgatgagcgaggccgaacgaaccgatcctgagctgttcgataccgtcatcggttatcgcggcggcaactggatcttcgagtgggcgaaagaagccatgcagtggcagcaaaaggccgggcaggaagccgattctttgctgagcggccgccactggctgcatgcctcgaacctgtatagcattgccgcttatccgcatattaaaggcgatgagctggcggaacaggcgcaggctttagccaaccgggcgtatgaagaagccgcccagcggctgccgggctcgctgcgcgagctggagttcaccatccctggcggctcgccgataaccggctttttgcatatgccgaaaggcgaggggccgtttccgacggtgctgatgtgcggggggctggactcgctgcagaccgattattacaacctgtatgagaactacttctcaccgctcggcattgccatgctgaccattgatatgccctccatcggcttctcgtcaaaatggacgctaaatcaggacaccagcctgctgcatcagcacgcgctgcgccatctggaaaatgtgccgtggattgaccatacccgggtcgccgctttcggcttccgctttggcgccaatatcgcggtgcgtctgggctatctggagccgcagcggctgaaggctgtagcctgtctgggcccggtcgttcatggtctgctggtggatcccctgcatcaggggcgcgtgccggagatgtatcttgacgtgctggcttcgcggctgggcatgcatgacgcgtccgatgaagcgctacgcgtggagctcaaccgctattcgttaaaaacccagggactgctggggcgccgttgcccgacgccgatgctctccggcttctggaaggacgatccgttcagccccgaagaggagtcgcggttaatcacctcgtcatctgccgatggcaaactgctggagatcccgtttaacccggtgtatcgcaattttgatcacgcattgcgacagatcgcccgctggatcaatcatagatttggttaatttattgctaaattctattggtttggtaaaacagttgcatcactaaaggagatcgcaatgacgttaccgagtggacacctgaaaagtaagttgatcaagaaattcacggcgctggggccttacattcgcgaagagcagtgccatgataaccgtttctttttcgattgcctggcagtttgcgtcaatgttaagcccgcaccggagaagcgtgaattctggggctggtggatggaaatggaagcacaagagtcacgtttcacctatagctaccagtttggcctgttcaataaggaaggatcatggcaggcggtcgacattgacgacccggaagtgagcgacaggctggaaaaaacgctgcgcgagtttcacgagcgcgcagcagcgctgctgaccacctttaatctgaagctggaaccggccgacgatttcagcgagccggttcgcctgcgggcctgattgatctacggatacgatttctccacgcccgtgcggcgtggagatgcgtgccgccatacccgtaatttccacccctccatctgactcaccctgcctgcggcgacagcttgccagccatcgcctgttgaataatcgggatcggagtcagtaagtgctcacgcatcagcgcgctggcctgttcggcgtcgcgcgccagaatagcgtccaccagggtctgatgctggacatgcttatcttccagcatctccaccgacagcacggtggtgcgcagccagatgaagcggtagcgcgccgccagatcgaacagccgttcgcgcatctgcagcagatactgcgaaccgcagccggcgacgatggcggtgtgaaacgcctgatggcgctggtcccattcatcgagtaggtgctcactcgcttcgcacgactccagcttgttgagcagatgggcgcgggccagcagctcggcttcccactcgtcgccgccgcgctcaatggcgagacgcaccagcatggcctccatgttggcgcgcgcgtcgaagatatcgagaagctcctgttccgacatgggcgccacccgatagcctttctgattgaccaccgttaccagccgctcggccaccagttgcgaaagcgcctcgcgcagcggaccgacccccaggccatagcgcgacgtcagcaggctcatccgcagcttctcatcggggtggtaaaccccgcggatgatgtcgttttttaaccaacggtacccgtcaatggccgtcgcctggggaatggcggtcatgttcttactcctgaatactcttcccggcgggcgccgggaacagggttaacgcgtattttgcagcggcagtttttgccacaataccagctttttccagcgtgacataatcggtaccgtacaaataattcccagagctaacaggccggtagagatcacctccagctgctgtgccggacggaacagcatcaccaccagcacgaaggtgataaaggcgatcaccagccaggtcaggtacggatagagccacattctcagacggatctcgccgccttgcgcctgaaggattttgcgcatccgcagttgtgaaacggcgatcaccagatagaccagcagggcgatggcgccagagctgtcgatgagaaatttaaacaccttggcgggggcatagtagttcaccactacggtgaggaacgccgcgccggtggagagcagcaccgccacgtatggcgttttgctgcggttggtccggcccataatggccggcgcatcgccgcgacggctcagggagtagagcatccgcgaggcggtatacagtgccgagttcagacagctggtgaccgacaggaggatcacgccgtccataatcagcttggcatagggaatatgcagcagctcgagcaccgagcggtaggagccgatgctcttcagccccggcatattccatgggatgagggcgacgacgataaagatcgagcacaaataaaaaatagagatacgccagatcaccgagttggtggcgcgcacgatatgtttatccggggtatccgattcggcggcggcgatggtgacgatctccgcgcccataaacgagaacatggtgatcagcatcgcgctcagcaccgcgccgaagccgttaggcataaagccgccgtggtcccacagccgcgaaatgccgctcacttcggcatagggataaaagccggtaatggcgaccgcgcccagtacgataaacgccagaatagcgatcactttgcacagcgccagccagaactcgaattcgccgtagttcttgacgctcagcaggttactgccggtgagggcgagagtgatgaccagggagaacaaccacaccgggacgcccggcacccacgaatgcagaataatcgccgcgatattggcttccagcggaataaccaggacccagaaccaccagtacagccagccgatggtataccccgcccagcggccgatggctttatcggcgtaggtggaaaaggagccagtatccggcgtggcgaccgccatttcggccagcatacgcataatcatcaccaccagcagcccggcaaacagataggccagcagcaccgccgggcctgcctcggcaatggcgacgctggagccgacaaataaactcgcgccgatcaccccggcgatagataacatcgtgacgtggcgcgacttcagccccgcccctaaatcctgtgattgcgacagttgccccatcatttaccctctcgaagtgtgtcacctgggagagcgccccgacgttcccgcgccggggcacgcgtattattgttgttttgcaggtctcgtcttcattcccttacgaacgtacttcgcttccgcatgtgttctgttctatgcctgtttctctatgcctgtttcgcctcgttaaagcagtcggcgatgatcttgagcccctgctcgatctgcgcctcttcgatggtcagcggcaccaggatgcgcagcacgttgtagtacggcccgcaggagagcaggatcaggcctttgtcgcgggcgcgggcgacgatatccgccgtcagcctggcgttcggcctgctgcggtcgccctcttcaaacagctcaatggcgatcatcgcccccagaccgcgcacgtcgccgatctccggatgatcttcagcgatcgccagcaggccctggcgcagggtatcgccgagctggttggctttttccagcaggttttcctgctcgaaaatctgcaataccgccagggcggcggcgcaggcgatggggttgccggcgtaggtgccgcccagtccgccgggggcgatggcgtccatcacctccgcgcggccggtgacgcccgccagcgggaaaccgccggcgatggatttggcgaaggtggtgatatccgccgcgacgcccatctgctccatggcgaacagggtaccggtgcggcccgcgccgctctgaacctcatcggcgatgagcataatgccgtgctcgtcgcacagggcgcgcaggcgctgcataaaggccggggaggcggcatagaatccgccttcaccctgcaccggctcgataatgatggcggcgatatcttccggcgcggcatcgtttttgaagatgcgatggatgctggcgatcgcctcgtcatcgctgacgccgtgcagcgcgcacgggtagagggcgcgatagacgtggcccggcattaagcccataccggcggagtaaggattcactttaccggtcagcgacagggtgtagtgggtgcggccgtgataggcgccggtgaaggcgatagcgccgctgcgcccggttgccgcgcgggcgatcttcaccgcgttctccaccgcttccgacccggtggtgaccagcagggttttcttggcgaaatcacctggcaccttctggttcatcttttcgcacagcgccagataaggctcataggccagcacctggaagcaggtatgcgacagctttttcagctggtcttcgacggcggcgacaacctgcggatgcaggtggccggtattgagcaccgcgataccgccggcaaaatcgagatattcccggccttccacgtcccacacccggcagttctccgcgcgttcggcgaagatagggtggatctggccgacgccgcgcgggaccgcgtcgctgcgacgcgccatcattgctttattgctgttcatccgtcgctcctgttaaaggccaatgcacatatatttgatttctaagtaatcttcgatgccgtacttcgacccttcgcggccgaggccggaggccttaacgcctccgaacggcgcgacttcggtggagataatgccggtattgatgccgattatgccgtactccagcgcttcgccgacgcggaagacgcggctcagatcgcgggcgtagaaataggcggcgagaccgaactcggtatcgttggcctgagcaatgacgtcggcttcatctttaaagcggaacagcggggccagcgggccgaaggtctcctctttcgccactttggcgctgtcgggaacgttgaccaggatggtcggctggaagaagttgccacccagggcgtgcggtttgccgccggtgaccaccttcgcgcctttggcgatggcatcggcaatgtgttcttcaactttggccacggctttctcgtcgatcagcgggccggtggtgacgccgtcctgcaggccgtcgccaatgcgcagtttttccaccgcctgctgcagcttctcggcgaaacggtcatacaccccgtcctggacgtacaggcggttggcgcagacgcaggtctgtccggcgttgcggaacttcgacgccagcgccccctcgacggctttatcgaggtcggcatcgtcaaagacgataaacggcgcgttgccgcccagctccagggagacttttttgatgtctttcgcgcactgctccatcagctggcggccaatctcggtagagccggtaaaggagagcttgcgcaccagcgggttgctggtcagttcgccgccgaccgcgccggcggagccggtgaccacgttgaatactccggcggggatcccggcgcgattcgccagttcggccagcgccagcgcggaaaacggcgtctggctggccggtttcaggaccatggtgcagccggcggccagcgccgggcccgctttgcgggtgatcatcgccgccgggaagttccacggcgtgatggcggcggtaacgccgatgggctgcttaatcaccagcaggcgcttgtcggcctggtggcccggaatggtgtcgccgtagatgcgcttaccttcttcggcgaaccactcaataaaggaggcggcgtagctgatttcgcctttggcttccgccagcggttttccctgctcgagggtcatcaggcgagcgagatcgtcctgattctccatcataagatcgaaccagcggcgcagaatgttcgcccgctctttggcggtcagggcgcgccaggcgggtagggcgcgattggcggcttcaatcgcttcgcgggtttcatcggcgcccattttcggcacactgccgagctgctcgccgttggccgggttggtgaccgcaatcacgtcgccgttgggcgcatcgcgccactggccatcgatcatcgcctgctggcgaaacagtgtcatatcgttgagttgcataaacgcttcctgtcttcagggtggttaacgggtaaaagcggcgtgtagtgtctccacgctacgtgccgcacgcagcgtgcgtccgggattgctctggctggccagcagggtctgcaccttgctgacgatatgcgcgccgatcgggatagcggaggtggccgctggcgatggcgcgttacaggtgtgaatggaacgcgcggtggtgacaaagagaaaatcgtcgatcagtttgccctgcggcgacaccgcctgcgcccgcacgccggccggccacgggcgtaaatcgctcagcgtcaggctcgggcagtatttttgcaccagccgcagatagccgcttctgcacagcgaattcttcatttcgcccagtccggagcgcaggttgttttgcagtacccggcggatgccgggcgaggtgaggatctccagggtatcggccagcgagatatcgcgcttgcggtagccttcgcgcttcagagccagcacggcgttggggccgacggtgacgctgccgtcgatcatgcgggtcaggtggacgccgaggaacggcatcgccggatcggggatcggatagatcaaatggttgacgatctggttgtgctgcggcgccagctggaaatactcgccgcggaacggacaaatgataaacccggggtcgacgccgagcatttttaccagccgatcggccatcaagcccgaacaggcgatcagcgtcgaggcctcatattctccgccctggcgggtgcggatcaccacgccgctggcatgttctttcagggcgctgacttcggcgttgtagacgatcgttccgcctttcgcttcgaagttcttcgccattgccgccgccacttcgcggtagctgacgatgccgctggaagggacgaagatcccgccgagcccggtaatgttcggttcgcgctcgcgtagctccccggcgcttagccactcgcgctgcaggccgttggcggcggtgcgatcccacagggcgcgcatccgctccatctccagcggtgaggtggcgaccagcattttgccgcagacgtcatagcggatgccgttctgctcgcaaaaggccttggtggcgcggttgccggcgaggcaaaactgcgccttgaggctgccgggcgtgtaatacaccccggcgtggatcacgccgctgttgtggccagtctgatggcaggccgggccggcctctttttccagcagcgcaatgcgggcgtccgggtaaatctcaattaactgcatggcggtcgacatgccgatgatgccgccgccgataatcacgaaatcatacatccgctcaattccttcgcctgaaaacccttattgatgagtctggtaatgattcgtggaatacgcaaagtagccgcgctggcgcatcagctcgcggcgcaggtccgggtgcggcgtaaagcggtcgcggccgtgcagccagaacaggttgttaatgagcagaaatttgcccaccggcaccggtatggaaaggatgtttttgctggtctccagcgcgtcggagaggcggctcagccaggtgccttcctcgaaatctttcggctggacgaactggtcgatatagcgcattaccgggcggcccagcgaatcgacgtcgaacaccgggtggaaaacatccttgctgacgtttttgctcggcggcgcggcccaacgcattgggcggcgagccagcgggtcgcggaaaaattcgtcgagatgctcccagtcgtcgagatgcagcagcagggaattgccgccctgcatgttctgctcgtcgatcttcatcattaatacgtagtcggtttgctcttcgacgtaggtgccgtcgttgtgcagctccatcacccggtgcggttggcgcaggtagctgtctgagttatcgacatttttcaccacgaagcgggcgtaatactgaccgctcatggcgtcgaagttggaacgaccaatcaggtgggcgacggcggtggccagcttgaccatctcctcggcctggctgacgtgatcgatcccttcgccgttgataagcagcgcgccttccgcgcgatcgagcaatgttttgatcagcaacggctgcagctgattgccacacagatcgtcgaggatcttgccgacctggaagcgtaagaaagatttgtactccagcgcctgcaccggccactgcgcgacctgctgcaggaactgcgtggtcgtttcggcggaaaaggtgagctccagcaggcgcggcgactgggcggaaggggtgaaagaaaagccagggtattgctgggctaccggcgcgggtgtcggttttactgcggtcagggcgttcatcaggatcgttcctcgctgtaaggtcagggtgatgttcatttcgtagccataaattaaaaatatctacatttttataaaatgcgtacgaaatggcctttttgtttccattttgtgatctgacaacaattatttaacaatgcgggaggggggataaggtggtggtgaaagttgcggaacagagcgggtggcggatagcgcaaaatggggataaggccgagggaaatcgtaataccggtcacagtttttaatctgcacaatatccttaccagatgacggtgttaatattcagccggtaaatacctttcaatgctcactgaggcttcgatgctggagaatgtcattatcagataatcagtttcccgacctgcccaggccggactgattatcgctgcgcttaaaccttacgcacacacctgcgggtgtaggcatgttttcgcacatgataatgaacaggtttcagtatgaatttatcccgtcaggaacaacggaccttacacgttctcgccaaaggtggccgtattgcgcacgtccgcgatacctccggccgcattaccgccgttgaatgctacacccgcgaagggctgttgctgagcgactgcacccttgcggtcttcaaaaagctcaaaaccaaaaagctgattaagtcggtgaacggccagccgtaccggatcaacacgaccggtttgaataacgttcgcgcgcaagcggacaaccgctgaaatagcgacccgggcagggtcgctgcccgggcgtttggctctcaaggagaaaacctcatgatcgatatccctcgcatttttaccatcagtgaaagcgagcaccgtatccataacccttttaccccggaaaagtacgccacgctgggacgggcgctgcgaatggcgccgggcaccaccattcttgacctcggcagcggctccggcgagatgctctgtagctgggcgcgcgatcatcagatagtcggcaccggcgtagacatgagcctgctgttcagtcagcaggcggccgcccgggcagaggagctcggggtaagcgaccgggtaacctttgtgcaccaggatgccagcggatatgtcgccagccagccgtgcgatgttgccacctgcgtgggggccacgtggatcggcggcggggtggcaggcacaatcgagctgctgaagcagagccttaccccaggcggcatgttgcttatcggcgagccatggtggcgcaaacgtccggccacggcagaagaggcgattgcctgcggcgcgcagtcacccgatgacttcctaacgctaccggcgctggtcgcccactttggcgaactgggctatgacgtggtggagatggtgctggccgaccaggagggctgggatcgttatgaagcggcgaaatggctgacaatgcgccgctggctggaggccaatccgcacgatgacttcgcaccggaggttcgccagcagttgaccaccgcgccgctgcaccatgtcacctggacccgggaatatctcggctggggcgtgtttgttctgatggcgcgttaaccggcatgtcggtagcgtcaggaggcgctaccgaccaccttcagaccttcagttcgtcgtagctgaccatgacgtgctggcgaaaggcgggccgtgcggttagccgtgcataatacgccgcaagatgggggaggggacgacgggtgatatcgatggcaaagtagcggtacagcacatgaccaaactggatgtcggccagggtgaacgtatcgcccaccagatagcgactgccggcgagacgtgcctcggcaatcgccagcttttgctccagggccgtcaccgccgcggcgatggcctgcggatcccgctcggcggcaggcgtgcgcaccacgcgccagaacaccggcgccgtaaagccgagggcgatattctgctttgaccactcggcccagcgatcaacctcagtacgagccagcaggtcgcccggccagaaggcgtcgtcggcgtagcgactggctaaatagcgaaggatcgcgccggtttcccacagcggcggattatcgccatcctgcagcactggcaccgtacgattgggattgagctgataaaacgcctcgctgtcggtaccgccatagcgatgccccacgtcgaaccggagatagtccagcccaagctcgccaacacaccacatcagcgcctgcacgttagaggaggtttttcggccccagatggtcagcatcgggatctccagagaacagggaaagaaggagcatagcaggttgggttgaaaacgggagggggtacaaaagaaatgagccacctcgccgcgcagggggcggacgcgctggtcagatgttcaaaccaggggcgtagctgagccagctattcagcgcacagaataagaggaagaaacagagggcaacagtttgccctctgtttacttgagtggccttgtactaaggtgtggcgctaaaaaactcgccaaatttgacggcgagccagccgacaggcgtcgtggcgccgccgacgatattggtgatctcggccatcccttccggcaccggaatatgcgagttcaccgccgcctgagtgtattcttgcgaaatgtccgtcccgacatacaggatgcaggtcacgatcagggttccggttatgaacatgcggaacatatttcgtttacagaacggcgtgaccattgccagcaggaacattaatgaagccagatcgacaaagggcagtacgcggttgccgggcagaatgatagacagcaccacagccatagggattaacagcagaccggtcgccagtaccgaaggttcaccgatcagtaacgccgtatccatcccgatgtaaaaatcgcgccccgggaatttagccttcagttttgcttcagcggcatcacggacaatcaacaatccctgcaccagaatttcaatcattttaggcagcagcagcatggcggctgaaaccttaatggccagtgaaacggccgcggaaacgtcatatccagccaggaaggccaacagcagtcccagcacaaaccccagggtaacaggctcgccaaaaacgccgaattttttattaatactttccgggtcgaaattgattttattgataagcgggatcttatcaatgatgtaattacaggcaatgccaaacggcacgtaagctatacaggtaagatgggggaatgatatccctttaagattatagtttttttgtaaatacggcgccgttaaatctgccgccaatagcgtcaacacaaaaatagcgaatgtaataccgaccgaaagccagtaatttcccgttccggcatagaccacagaccccatgatcaggaaaatccagtagttaaaaatatcgatattcaccgttttggttaatttcaacagaagcatggccaggttgatgacgataaagcccaccacgacgggcagcatcagcggcgaaccccaaccaatggtcgatgcggtaggccaaccggtatcaacgaccgttaactgcaggccgatacgctcaaccatcgcctgcgatgccgggcccaggtttgtcagcagcaggccaatcaccagccccaccccttcaaaaccaatgcctaccagcatccctgctttaaatgccgtaccgattttaacgccaaagcaaagcgcgataataaagaatattactggcatcattactgatgcccccagactaataatgctgttgataatatccataatgattccttaaaaggcgggcgaattgggcacgagtaaacccgtgcccattgggccctgttaatacctttaatggttcttttaatatttaactgagtttctttaaaaggatctcagcgaagagtttgggcgaattactgaatgcgtcaatggtactcccggcaatatgcggcgtaatagtcacgttattcagagtatagaatgcactgtcgtcaggaagcggctcgtcatcaaaggtatcaagcgcggcgcccatgatttgcccggatctgagcgcatcaatcatctctttttcattgattaacccggagcgtgctgtgttaacaatgatggcactgcgcttcatcagcgcgaaatggtgtgcgttaatcagattttcggtttccggcgtcaggcgagcatgtaacgagataacgtcggcgcgttgtaccagttcgtccagagaatcgactttctcataacgttcatggcctgcaacgtacttatcgtaaaagataatctccgtgccaaagccgctgagaaatcccgcgaccagttgggcaatatgaccgaggccaaccagccccacgacttttccgccaagctcagggattgcctgatggttcgggctgtctttacgccagtatttgtcacgcagggcatcgtgtgaacgggcaatattgcgcatttccgccaggatcatgccgaccgtgaattcggcgacgctgcgagcgttacgccccggggtgttcatcacctcaacgccccgggcgttcgccacctgaagattcacgttttccacaccaccgcggagcacgcctacatatttcagctttggtagtttatcgaacaccgcagtattgaccggggcaaactgagtgatcaggatgtcaatatcatccgttccctgaagcagcgcttccggtaaggccacggcttctgctccttcctgttcaacccgcagattatcttcctgaagtttctcaacggagccatgtgaccactcgcgtacttctacttcaatcccgttatccctgagcgctttcagtcctgattccatcatcgctgcattgataaacagatcggcaattgccagacatttcataatgattctccctagattaacgcatcaacataccgccggtaacgtccagagttgctcccgtcatatagctggtcttaggagaaaccatgaagacaccgatgtcggcaatttcttgcggctgggccacgcggcccaccggaatacgactgacgtaatagtcagggttttgctcaatgttcttacggatcatcgcagtatccatgatcccgacggcgatattgttcacattgattttttgtttggcgacttcccgcgccagagagatagcaaaggcgaccaggccggccttacttgccgcgtagtgcgcatgtcccgtcgtggagccgtggaacgcggcctgcgaggtaatattcagaatgctgcccatctggtcatgctgcaggcagtgatttacaaacagctggctgagatggaagatggctttcagattgacattcatcaccagatcccagtcctgcgggctgatctcggtgacgtagccgctcagccagatcccggcgttattcaccagaatgtcggctttacccagtctgtcgatacaggtggcaaacagattttcccggctctgttcgtcagagagatcggttttgaccgcgatgatctctacgttcgcgctggccttcaccgtttcgatcagccgttcgggatgctcttcctcacgcatataggtaaagcagatattgacgccttctttggcgagagaaagaacaaactctttccccaggccggttgcgccgcctgtcacgatggccgtacgattcgttaaattcagatccattttttcctcacttagtgcgcgatgtagttgctgcagcttttccacggcgactgcatttctgataacaggtttttataaagctggtatttggtctggtagacccggtggttttccggattaggggagacggtgcgtgagacatggaccatgtcgtttgaggcagcaaatacctccgcaaaccagcccaccataacggcggcggtcatcgcggtacccagggtcccgtgctctttgacgtcaacgatttccagcgtggcctggaagatatcggcgaatatctgcagccagaccggggagttcgtgacgccgccagcaatacgaatagtgcggcttagcttcgggttaatattgcgtaagcgctcggtgtggtagagatggctgaaggcaacgccctcataaatcgcccgcagaaaatgggcttttttatggaagctgttgacaccgataaagccggccgaggcgtcgggaatggtgttagagccaaacacgaacggaaagaacagcaggtggctttcatccggcgtcgttgatgaaaccagcttattacacaggtcatagaccgacgatccttgttcggcggaggttttccgatcgctctccataaagttgttaataaaccactccaggttgctcgcggaggtggggctggcctcggtgatgagccatttaccttcaatgggataaatggaggtcataaacagatctttatcaataaccgggtggtcggtaacgtattcgtttatgctccaggtgccggtgacgatcgccatcttatcgagactgttaatccccgaggcaatggaagaggccgagatatcaaacaccccgccagaaaccggcgtacctgcgcataaaccggtcagacgggccacgtcgtcagtgatttttccgcagcattctgttgagcgtttgatggggggcaatttgtcccgcagttcatcaagtccccaccatgccagtagttcatcgtcatacttgcagtcacgtacgttgatcaggttggtccctgagatatcggtcagctcaagaaaagcctctccggtcaggtaaaaacggatcaggtccttgaccataaaaatataacgcgctttttgcagcgtctcgggctcgaaattcttcagccatgccagcagggcgacaggttgtccggcccagatggactgcatcgtttttggcaaaatgtcggtaaggaattctggcgagcgttgccatctctcaacgtactcttttgcccggctatcggtggatataatgccgttacgcaccgggtgaccttcttcgtcgaccagatacagaccgttaccatgaccggtgacggccactccttttatctggctggcgtcgatacctgattgctcaatcgcttttttaatcacttcgacattcgcggcccacagctcatcgatactgcgctctgtgtggaattcccgaggtgtcagcatctgcgtggattttgaggcgatggcgagcacctgtcctttacggtcatagatggctgccttggtgacggttccaccattgtcgatgcccatgacgtattcatctttcattcgcgtggactccttattggttaccataagccgggctcgctggtggttatccctttaaatccggcatggaatattttatctacaaggtatttgcgcttaacaaagcctccggcgatgaataccacatcaaagcctttcaaatttcggctaatcaactccagacactggcaggcatattcagcaggtaagatttcaattgcgtccggtggactgtgtttaacaatatcgagcgactgatcaagcgatcgcgaatcgataagtaaaacccgatatacggtcagcaatccctcttttttggcgtagcgtagcgcggagagattggaagaaataacaccatcaaccttgtaataatttttcagcagattgatccccgcctgatccggtttaaagccgcccagtaattcaaggtgaacgaggaccttcttaccgctttgatggcatttgccaatcagcgactgcagattgccgatattcgcttcggatagcagcacatattctgactggcaggataatgctttctcaaagtatttatacttcctgatggaagggatgatggtgttatttgaaatcatattaatttccgatgttatttagccatgtagaggctgtatgcatcttccgctgttgcgttttcatggatgatggcattcagacctgctaccactttcgccggctgcggatcctgggtaatgtttcttcccacagcaacgcctttcgcacccatctgcatacagtgctgaacaaatttgaagtaaccgtcgatgccggtttttggccctcctaaggcaagcaccggcacgccagcagcttcaacgatcagtcggtcctctggtgaaccggtaaaacgcgttttgatgacgtccgcgcccagctccaccgcggcgcgggccgatgcagcgatgatggccggattgttagagtcatcgctggtgacgggataaccatacgggagcgattcgacaatcagcggtacattccagcgatccgctgcctgtgcgagttgcatcgccataatgtgggttttttcttcattgaaggcgccggggaaggtcatgcagaccacgccctcggcagcgactttaagcgcatcttcgacggaaaaaacgggggtagtatcgggaacggtattgtcaaagatactgaccgtgctgtcgacgcgtaacacaacgggaacgctgttcagtgcttcccgataattcttcaacatgccgtacgtgacaagcgcgcaatccaggccgtgttccaccagagcagggagctgatttatcgtattatcaataccatttgttttcgtggaaaaatagtagccatccagcgctaaggtcacggatttaccgtcttttgcgaatattcttgagagacgacgttctttagacatttgtttactcctgagataaaaaaacaaaaaaaaagccctcagagactcgcgtctctgagggctttctgttcacatacccttttgataatggttcagggatccaaagcattatcaatacaattttttagcaaagtgagaaaggtttaacttttgtttaaattaaatctgttctcttgcgtgattaaataactaacacacgcgataacttattgtccagttggtatcgttgaaatgagagattcatcacatcaatatgttgtattacctgagaagttctgggttaaatacagaaaccgaccccttaaaaaccaggcaataacgcatccggacaaggggagaacgccaggcgtttatttcatccgcatgaagaacgcatccatgcatgctccagccttcaggtcgtcatccccaaacgcgcatttattcctgtccggatggcgtacgaaaacgctatagcaatgttgtcggcatggcggtctgtccccgggatgatttcctctagccgcccgggcaaattactcgtccgctttgtgcgcccaggcaggcatcgccgtcaggtaacgttttgcccgtttccgtgattccgctacgcccaccttttgccaggcgtcgagaaaagccgccagaccggatacggcctcttcccaggatttcaaattaccgtcgctgtcgcagcaatacgcgcaatatttatcgctggccccttgcgcatcgggtgcggacatcggcattccgcaggcctggcaaaacctttcgtgctgtgtcatagagcgctcctcctgtcgtttggttgtctactaaacatacagaatttacgcatggcgcttagcgtttcagatcaatagatcctgccgtaaccgttgttggggatcttctgccggggagtgcgggagggataacgggaacttactccgtatcgcacagctatcgcctcccttattttttattgatgcaacggttggtcgcaggccgcgaggattgattcatgcatcgcttcggaaagtgtcggatgcgcaaagatcatcgacaggagactttcgtctgtggcctccaggtgacgggcgatgccaaagccctggatctgttccgtgacctgtgcgccaaccatatgcgcgcccagcaactcgccggtttcagcatcgaaaatcgtcttcacaaaaccctctgtctcgccgctggccagcgccttaccattgctctgataagagaacttaccgatcctgacgggccgtcccctggccagggccgtcgattccgtcaggcccagactggcaacctggggccgggcataagtgcaaccaggcacatagtcgcgatcgagagggtgggcgccttcgacaccggccagtgtctcaacgcagatcacgccttcgtggctggccttgtgcgccaggcacggcgggccggctacatcgccgatggcataaagcccgaatacgttagtgcgacaagccgcgtccgtcttgataaaaccgcggtctaactcgacgcccagtgcttccagccccagatcttcaatattcggctgtacgccaaccgccagcagcacacgttcgacatcctgagaatattcgccgccggtgttgtttagtgtgcagcgcaccccggtatcggtgagctgtacttgcgtcaccagggtctgggtatggatctgaatatcgcgtttttcgaatgacttacgcactgctgcagacacctcggcatcttccactggcaaaatctgcgacgctagctcgaccagcgtcactttacagcccagatcgttatagaggctggcgaactcgacgccaattgcccctgaaccgatgattaagagcgacttgggtaaaagcttaggccgcagcgcctcgaaataggtccagatatgttcgccatctggcgctatgcctggcaatgcgcgtggtcgggcgccggttgccaggatcacgtgatcggcccggtaatcgcgcgcctcccctcgggcatcctcgaccgtgatttgccccttgccgcgcagccgcgcggtgccatcaatgacctgcacgccatttttcttcaacaggtacgcaaccccagcggtgagctgttgcgatacggtacggctaaactgcaccagtttctgcagatcgacgttcacctcgcccacgctgatgcccagctgactggcatgggtgatagtgtgcgcaacctcagcgccatgcagcagcgccttggttggaatgcatccccagttcaggcagatgccgcccagatgttgtttttccactaatacggtacgaagccctagctggccggcacggatggcggcaacgtatcccccaggacccccgccgatgatcagcacatcgtatttatcgtgcatagctcgtctcctggataaacatcaaggtcggggtttcaatcagtcgcttgagttcccggagaaaagccgcacctgccgcgccatcgatgacccggtgatcgcaggatagcgataccgtcatttgctggcgcgcgacgatttgcccgtcgcgtactaccgcccggacctctccggcgccaatggcgaggattgcgctttgcggtggattgatgatggcgtcaaactgccggacgccgagcatccccagatttgacaggctaaaggtcccgccctggaactcttccggcttcagcgtgcccgctttggctctggtcaccagcgagtgaatttcgttcgatatgtcgctgatcgatttccggttcgccgagcgaacaataggggtaattagcccggcaggcagcgcaacggccaccgaaatgtcggcatccgtaaagcggcggatactttgtgccgcttcatcaaactggatattgacgtcaggcacggccaccagcgccagggcgcaggccttcaccagcaggtcattcaccgaaatcttgacgccgggtacttcgcggttaatgtcctgacgtaacgctaacagtcgctccagatcgagatcgacgctcaaacggaaatggggagactgttgcttggacgtttgcaggcgagaagcgatagcccgccgcataccggacatcgggatgctctcaaagggtgccggggcactctcctgcacagggctggtctgcggttgctcgtcgagtaacaacgccgcggccagcacatcatcgcgactcacccgaccgcgtgaaccgctgcttcggcagtcatgtaagttgatacccagtttgccggccagacggcgcgccagcggggtggccgatacctggctatcatcggcatgcgagcggggcgctttgctgcgacgaacgggaggcgtcggagaggccaggcgaccgccggcggcaacgatcgcgctttccagatcagatacagagatacgatccccgcgcccgctgccgcggacttttttcaggtcgacaccccagcgggcagacagtcgtaacgcatggggcgtggcattaacctgagtcacatcggtcacgccttgcagactgacggggatgacggtctgcccaacagggggctcggggctgttggatggcggggaaacaacggaagctggcttagcgcctgcctgtgccgctacgtccggcgcggcagcctccgggcctggggctgcgggtttcgccgtcgccaggcgggcaacaaattcgtccagttcagcatcgctgaccgacgcgtcagccgccagggccagcacggcgcctacctgaagcgtctcaccctcgcgggcgagtatccgacgtaacgtaccggcaaagggggcctccagcacattgacgattttactggtttcaatctcacagatttcctgccctctggtgaaatcgtcaccctcctggattgcccatcgagcgagcaagccttcctccatggaaagcccccactttggcatttcaagcgtcttgatttcgctcataggttaatcctccagcacttgacggacggcggcttcgatacgttcaacgccagggatccagagtttttcgagagcaggggagaacgggaccggcgtgtgtggcggcgtcaccagcagaacgggcgctttgaggaaatggaatgcctgggacgcaatcagcgccgcgacatcatgagcaaaaccgaagcgtgcagcggattcgtcgacaatcacgacccgccccgtggacgccaccgattccagaataccttcctcatccagcggcgaaatggttcgcgggtcgaccacctcgaccgagatcccctctctggccagtttgtccgccacctggtttgctttatgtaccattgccgacaacgcaatgatggtgacgtcctccccttcgcgagtgtagttggctacacctagcgggatggtatagatctcgtccggtacctcgcccttgaggtcgtacagcattttatgctcgcagaataccaccgggtcgtcgtcgcgaatggactggattaacagacccttgacgtcataaggcgtcgagggcaccaccaccttcagtccaggcgtggtggcaaagatattatagggtgactgtgaatgctgggctgcggcagaaaaccccgcgccgatcatccctcgcatcaccagcggagctctggctttgccaccaaacatgtagcggaacttagccgcctggttgtacagcgcatcgtgactcacgccaaaaaaatccatgaacatcaattccgcgaccggccgcaaacccgtcgctgcggcgccggccgccataccgatgatggccgactcggtaatgggcgtgtcgatcacccgatcggagccgaactgcgtccacagccctttagtgacacccagcacaccgccaaaggcttctattttcgcctcttcgggcgcatttccgccatgaccgccacgcaagtcttcaccgatgagcaccacgcgttcatcgcgttccatttcctgagccagggcttccttgaccgcttcacgataggtttttattgtcatggttatcaccctcagtatgagacgtacacgtctgtcagcaggtcttccggagccgggtaggcagcggcgcgggccttcaatacggcatcgttgaccagggcttctacttcctcgtcaatcgccgccagttcttcctgggtgatatgttgcttgaccttagcggtgaaaatcttcagcggatcatgttgttcacgcaggcgttgcacttcaccttccgcacgatatagcgcgggatcgccctcaaaatgaccatgccagcggaaggctttggcctcaatgacgcttgggccaccgccttctcgcgcacgcttgaccgcctctgaggttgcctcataaacggcaaagaaatcggtgccatcgacggtcactgccggcaggccgaagccagcggcgcgccgggcgatatcacgcccacccacggcgtagtcatggccggtcccttcgccgtaaccgttattctcgaaaataaagacggctggaagctggagcacgacggccatattgatggcttcaaagaccaggccctgattagaaccaccatcgcccgtaaaagagacaccgacgttgccggtttttagcgtctttgccgttagcgcggcgccgatggccaggggaggggctcccccaacgatagcgttcgcccccagcattcctttcgacagatcggcaatgtgcatcgacccgcccttaccgcgacataacccgctgtccttaccgaatatttcggccatcatgccgtgaatgtcgcaacctttagcaatacagtggccatgtccacggtgtgttgaaccaataaaatctgcgctcgttaaattttcgcagacccccaccgcgatggcctcctcaccggtgtaaaggtgaatgaagcccggaatatcaccgctggtattttcctgatgcaaccgctcttcaaatgttctgatctcccgcatcttgcggtaagcctgcaataacgcctgtttgctgagcatcgtttaattctcctcaataaaggtcacccaggcggggccaacagacagggcggataaccctggccacacccatgcaatgaatctacgagcggttaaagggagtgcgaagccaccttcatggggggtaggtgggggttttcatgcttgaggtcaaactttctaaattttgtgtagcaataaagtttggctgccccatgtcatcccgggggctggcgtacaattgaaaaaaacaaagcgagtagacaccacggatgaagccattggatttagaaggtcgccaatcaccctcactggtctccgggccattgcggctgacgcgaggcttgccgctaatcctgaccaaattcgtcccgcctcgctcctcaatacaattgctggagcgcccccggctgcttcagcttctcagtcccgttcagcagtgccggctgggcgtcgtctgcgccggcgctggatttggcaaaaccacgctgttggcgcaatggcatcagcagatggtcgcccagggcgaacgtattgcctggctgagcctcgatgaggatgatgatgacgtatggcagtttattccttatctgctgcaagcattgcgtccactctatgctgactgggacgccgatttctggcgtgacatggaagagcagaagctctccagctccgagcaactgctggccgggctcattaaccagctacactactgcccgcatgacgtgtacctgattatcgacgacttccacgtgattaacgatcgtggggtctatgaagcgctggggtatttaatcaagcatgcgcctgccgccttgcatctgatcattggcagccgtttccacccgaatcttgcgctgagccagctgcaggcccaggaccaactggtggagatctatgatcgagacctgcaattcacgctcgaagaaacaaaacactattttagccgcacggttgcgctacccctcagcaaccatcatgcacagcggctacagtccgtgacagagggctggatcgcgggcatgaagatcgcttcattgtcggcagaattacagaatgatcccgagcatctgttgcgtaatatgcatggaggaacacgatccattgcccgctatctgaaagaggtggtactggatccgctgccggaagaggttctcgatttcctggtgaaaacgtccttcctcagtcggttaaatgccgaactatgcaatgcagtgactggacgtgatgatagtaaagcgatgctggcatggattgagcgacacaacctttttttgtcagcccttgacgaacaaggctactggtttcgctaccatcctctgttgcaggaaaatcttcggaccatgctgcagcagaacaacgatattgaccgcaaacagctacatgaattagccagtcagtggttcgtcgaacagaagctgtggtcagaggcggtacgccatgcgctcagcgcaggcaagccggtgcatagccccgtgcaggacggcgcaagcgctcagtcactggcggaagaaggggatatcgataccctgatttcatggatgcatcatttaccgcccagcaccgatccgtcgcgcattgacctgcaaattaacctggcctgggcactggcgcattatttccactttgatgagtcgaggcagttgcttgataacctcgatcagatggtactgcatcatcgcgatgatttaacccgcagcacctggtgtaaattgcgcgttgtgcgggcaatttgcgaagcctttgcggaaaacatcccggagagtctggctatagttcagccgttgctggccgaagtgccctgcggcgacacctgggttgatggtctgatatgcaatattctcagctattgccatgttgttaaccagcgctatcacgacgcgctggaggttcaacagcatatgccctctccggaaagtcctttagataatctgtttgtctcggtttatcgcgcgtttatcattgcccagtgccatctttgtcagggcgatctgggaaaagccgggtggtacgcagagaaaacgttgcgccaggctgaatgttataccggtacccagtcgaccagtggcgcgacgctggcgccgctgctggcggagatagcctatgaatgtcagagtggtgactcgcccgatcatctgttagccgaccggctcgaattcatcgaccgattcagtccacccgatgcgctgagtcgttgctatacctatctcgcgcgtcaggccctggatggcgatatgccgtatgaggccgagcgattgctggagcatgcgcagcgtcttgccgtgtctcgcggctggcaacggctccaggccatgatgttagccgagcaggtgagagtgcgactgcagcacggcaatttcacaggcgcagagcaactgcaacgacagcttgaacaaatggccgccagcttccgaatggatgccgaacatccctgtcaacgcgctatcgttctgtatgcatcccttagccactgtcgccttcttctcgccagaggccaggcgccgcaagcctgtattctcctggctgacatggtctctgatcaggaaaaccggggggacaggttaaccgcagcgcgtctgcgtacgctctggtcattagccttgtggagcagcggcaaaactgccgctgcgcgcacaacatttcagccagtcgtgcagctggctgaacaccagcatctcaaaggcctctttcttgacgctggcgataccttgcaacctttgcttgccggtatgaatgaatcctcttcggctggtaaagaggaagggggagtgcatgaaccctgggccgacaagcgcgcgcctgcagatggaacaccgtttaatagtggaagccccgatattcaaggggaactcagcgagcgagaatttcagatattacaactgatcgctgaaggtcagatgaataaagaaattgctcgctccctcgctatttctgccgagacggtcaaatggcacatcaaaaacatctacgcgaagctcaaagtgaatagtcgcactcaagcgatgagccgggcgctggagatgaaattactggattaacggtttgaagagggagggctggatataaaatattataaagacgagccactttcttaacggggctatgagccacggataatcccgacatttctgagaccatggggcttctctctctgaacagtgacgacagttttgatgctctggctcagcgatatggacattgaggttagggggacgacgccaggggaagtcattacagtgaagctttaggggggctgtaacgttttgattgatgataataggaacaatacctatgcactattttattgattattaataaaaattacctgtttcatctttgttgatactcccaatggattttttgtgttcgtagtgagagattattacttgccgagagctccttttgaacacgccgcacaatagctgattgtgtctagcagtggcgtgcccaacagaagcatgagcctaacactggattgatattgctaccatccgcattatcttagtggaggtaagagcaatggctataggtgagatactgttttattgtatgagcatggtactataagaccacaagaaaaaaacaagattgaggggcctgatgaacgcaggagagattggaattgaagccgggcgtatttttgaatacaacttaccaagccattggattttccgaagtcaagaggatcaaaatgattttggtattgatggagaaattgaactcaaagatggtagtggcaaagctcttgggaaagagagtgttttcaaagttcagattaaaggtgaagagaactcaacctttattcatgacaatagcttattatcatttactctcaaaacagagcgtttgagatattactttgaatttaaagtgcctgttattttagttgtggtagagattacgtcagagaaaatattttggctcccaataacaaacaatgcgatattaagaaaaaaagcttcaaaatctaatcagaatgatacagttcaagttcatatcccaattgaaaatacactggtcagaaaagacatagcatcagcaaataaaatattagacgcagccatagattgttgggattacttgaacattaagggacttaaagattctgttgtcagatatccaatcattagcccttcaactctcgataagaaaattgaagatataggtgaagcattatataaagcgtatcatcagcagttggataatcttttatctgaaaggaaatatgatgctgtttttaaacgctctaccgaaataagtcattcaccaatagttcctgcaaaagatagatttatagcagttttatattacttacaagcattccaaattgctccttatactaatattaaaagagaaatttacagagaaaaattttatatttgccaacatttaatattattagctagagagcaaaaaagccggattcacagattaattgcttttggtaaatcacggaaagcaaaatttaaggctcagttggatcagcttcatgcgacccatcattccgtcaatcactttgaagaaaaatctttagagcgttatattttcaatgatcaaactcaaataatgtatagagactgctgcatatccctacaaaagatcattgagttatgtaacaggatgacaagaaaccagcaatatcacatacttgcagatttttttgttgatatctatgcgtctattttaatattcaaaggaatccatgaagcacggggttcgaaggaaacaattgattttctagatgattggcatgaaagaatgtcattattagtaatgacatattgcgtattatcaaaagatattgaaaaaattgaaaaattatacttccttactgccaccttactaaaacaaaaccctaaagcaacccaaccccatcggaagatgattctttcaacttttcctgattttgaggaagccctaacagaaatagagaatcatgttatccgtcttgacagtcaaaaagatttttatgatcttacaactgaagagcaaaaagaatacttcttgagtatggccaaaaatctaggaatggatcctgatgacccacaaggagaatatcatgaattccttaaaattggatttgctaattatgaccccacaaatataatgaaaaattgtgagtatttatttgttcattatcgccctggtggagtatttgcccaatcattaagaaygcattctctaggtggtatgcatcttttgatctgcttaaaacaccgacatgcacaaggaaccggaaatttattaagtcaattatatgatagtactggtagctatgatttcggtaatagtttcaaacaatcaaattgtgataactgcacggattgtaaacccagagaggatggctggtcatggagtctcaaatggtattcaaaagaagtcgaacgttataaagatcttcttaataagtataaattttaattacctgaccctggccaaaattcagtgcagtgctaaatcagagatcttcgtctttctggagacttcggatgaattcagccggagtcatgtcatttaatgatgaatgcgttctctcatgattatattccctgcgccagttgtcgagtttgtcctgcgcatcttccagcgagagaaaccagtgaatgttcaggcactcatcccgcagactgccgttatctgtctgaatacgtaccggcaggcgcttgcctagcacccgcaacctttccatcacaccgaccacatcctcacctttcagcgactttcctgcatggatcgccagacactcccgactaaaattatccactacagtcagcgcccggaaacgtcgtccgttaaacaggtgaccctgacccaagttcagtgcatgaaaaccagtctgttaagcgaagcgggcagtcggccggggctgctcacgctaagctcttttagtcgagaagcttgagaatatcagtgattattccgagcatattaaattcacatcgattaatgttaaccaccccacaaagcccctggttgacgctttttatctgtccatcagtatgatacatctgaaaatctccccttaatcccttacgtcaaccgacgtcaaaaactgaaaatcggaatgagcgacaaaaaaggattgcccatgaaaaacagtgagatagaaaatgacttagagcaatttcaggaattactgaactgccccgaacaaaactggttgcttggtgcagggataagttattccgcaaaaattcccttaatgtaccccctgacctcgaggattatggagttgatccaagaggatgccgaggccgtaaatcttataacaaaaataaaatcagaacttccaccaaacctccatatagaacatatacttagtcacttaggtgactactctgcaattgcttctcgcacattgaagaaagaaattgaaatatgcaaagaaaatttcacattagattgcattgaaaaaattcataataaaatacttaaatatattgctgatacaatacgatacggctatgtagaaaagcctgaaaaaatcattggtgataaagataatttcatagtcgatataaannnnnnnnnnnnnnnnnnnnnnnnnnnnnnnnnnngtttaagagctggtataaatgaacgaagaaaaccaatacggttattcacaacgaattatgacacattacttgaagatgctttggcattaaatagaataccatattgggatgggtttagtggtggtgctgttgcgtataggtcatatcaatatggacaaattgaacctatgaacgatgcaaaggctcacataattaaaatgcatggttcaatagattggtttcaaaatgatgatgggtctttgtggagagtaagagaccgggatacatatcctattaaaaacaatagagtattaatctaccctcaatctacaaagtacattgcaactcagaaagatcccttttctgcacaatttgatttactcagaaaatcgctgaactcattatcctatcatgtattgattgtttgtggttatagttttggagatgagcatatcaatcaagaaattaatctatcgctatccaatcctaataataaaacggtcctgcttgcattttgtgaggaggttgataacaagataccggaagtgcttgatgtttggagatgcagtgattggggggaaagagtttatgttgcaacccaaaatggtctttatgtaggaagtaaatcacccattaagagaaaggatgaatatgatgattggtggactttttctgggatgactaaagttctaaaagaaggggttctatgatgaaattcaaaccaatagaagagttaaaaatagggcacgtagtagaagtgaccggtacaaaaataagagtagaactgtccagcaatgtagaagagttgactagaagttattgtggtaaagtttatgcaataggacaactgggtagtattgttaagataaacttcggaagaaatatcatttttggttttgtaactcttttaagaatgagatcggatgaattacaacctaactctctaccaatccctccagaagcagaccaacgtatcatggaggtagagttgttctcgcacggttactggtcgccatcaaatcagaaattaacattcaaccgcggtgtaaaaatatatccattgcctcagcagggcgtttatctcctaactcattctgaatcagcagagctcttcagtgctgcagaaggtgcaagagacaactcgtgtaaccctttagtgccattcgctcactattcaagtgcaaattcaataccttgtagggcaaatattgacaaattatttggacttcattgtgcagtattaggctcgacaggatcaggaaaatctggtgctgtcgccactattcttcatagcatattagaacactcaagcattgagggcaaaatcctatctcctcgaattgtaatgatagacccgcatgatgaatatgggttagcctttaaagatagagggataacttatcaagcttacagtgctcttgaaaatgatgaaagtaaaaaaaacataaaactcccatactggctaatgtcaagtgatgagtttagaacattaataattggcaaaactgaaaaagaagcaacgtcccaaaacaatattatatacaaagcgctatctcatgccaggatggttacgtgtggaattacaactcatgcgccagataactataactggcctctaccgacagatggtcaagctctagatgaaccgaggccgacagaagggcattctattgaagaaatactttcatttgactctgataaaccaattccgttttgtttaaatgaatttgaaaatcacataagatacattcaagcagccagagtaaaatcagggaaaatagaaaaagaaacagaatcaacatttgctgagaagtttaaatcaattttagataaattatcagtattaagacgagatccaagaattaaattcatgatggaaaactggtctccgaagaatgactgtaatcttgagaaaatattagaccagctagttggcgaaatcattattgaagaaaaatataaagatatacgaatcattgatatatctggcctacccaatgaagtcgctggcccattagctgcaacacttgccaggctactatttcaatataaaatacatcaaacagcatctgaaagaaataaagatccatttcttctagtctgcgaagaggctcaccgctatgttcctaaccatggtgaagcccaatacgcagctgcacaatccgcaatccggcgaattgcgcgtgagggcagaaaatatggtttgggactaatgttaatcagtcaaaggccagctgatattgaaagcactgtcatttcccaatgcggctcatgggttgtgttaagattaacgaatgcgacggatcaacagcatgtctcaacatttttaccggatggcctttcaggtttagtcgcgtctttgcctagcttatctcagcaggaatgtatattcgttggcgaagccgctgcattaccatctagaattaaaattaattttctaccggaagatagaagacctcggtcagagaacgtgagtttttctgagggatggtctgaaccgagatttacagtagaacaattaaagggtattgcagacagaatgtctggccaagttaaaatatccgataatgtgcaagttaatgttcaggtagatgatttacctttttaaattttagccgggtgatagcccggctagcattgaaaaatatatgatgagtaccaatccatcatttcccccatacgatttaagtactgagcatgattataaatcccacgaatattgttcttatcgatatgtgctaattgcatttcaatctctgccctctcatatcctttttcgtgtaaaattgttgacaatgtatgcctgaatccgtgccctggaacgcgcccagcatatccaattcgctttatgacttggttgatactagcctcactcataggcttgttcggatcattccgtcccggaaatacataacgatacttacccgtcataatcttgagttcattgagtaaatttaacgcttgagtcgatagtggcacaaggtgtgccctccgcattttcatcctttctgctgggatttcccaaagagcgttatctagatcaaattctgaccacaatgctgcacgtaattcaatgtttctcacacccgtaatcatgagtaatttcgtagcagcttgtacaagccgactgcctgtgtaactgtctaaggcacgcagaaattcgggtatctaatcagcttttaggaagtggaaatgattggattggtgtacttcgagagcgctggaaagatctgccgcaggattgtactccgctctacccgttacaattgcataacgaaacacttctgaacaacgctgtcgtactttgcgcatcttctctaacgccccgcgttttttcaattttacgcagcacattaagcagttctagcgcttttatttcacaaatgggtcttgtccccacatacgggaaaatgtcgttctgtaacgcttccatgatatctgatgcatatcctgccgaccatttggcggacttcatctgatgccactctgtggctatcttttcgaacgcactttcggattccgtttgcaaagcgatcttctgctctattcgaactttactcgggttgtttccttccgcgagcagttttcgggcatcgtcacgacgagaacgggcgtctgcaggtgtgatcgtaggatacacaccaggcgagatcattttaggcttaccgacaaagcgatagcggaaccgccagcttttgcttccattaggttctataaacaatgacaagccttgccgatccccaagagtatagggtttatcttcggacttagtgcagcgaatctgcatctcattaaaaagcaggtgtataggaatccaggaccgaacaaggacatatacataatcctaaataccttaagtatcggactttactggagagttacggacaacgatggactaaaaagcagtaaaatcgttataaatcaggatagttatggataaatacggaagttgggggaagttgaaatggtgcgataataggaacataacatcgctaaacatccaattgattttcagtgagttatattcattaagttttctaaggtacccccaaaagtacccccaatcagatcccgtctgaactctgacagtaaaaaatgttgcgggctgcctaatagacagtccgccagcacggttgatgtttttacagagactaatcaaccttccaaacgttaactgcttgttgtgacatccacttttgaaaatcattgacagattctaaattccactctgcatattctgttacttttaaggccaacttatatccggattttgtatattcttttttcttctcttcaaaggatgagcgttttaaattatctttatccattaagatcatgtttccaagtctatcttttacatcattaattccttcaccaaaagattcgttccaatctttctctggatgataagggcaaatatgctctaatgtcgttttttcataatcacatggattacctaaatagccttcaatttcagaaagtaaaaaacgtatttttttcgctgtttgtctacttggcattctatgaaattcaaaagcattaaagaaagcattatcatcaggatacaaacgtttaaattcttcgctatttttcacatgactagctcttaagaactctcgattataaactttgttcgcgatttgattataaatattctcttgttcactaggtgataaatggcagnnnnnnnnnnnnnnnnnnnnnnnnnnnnnnnnnnnnnnnnnnnnnnnnnnnnnnnnnnnnnnnnnnnnnnnnnnnnnnnnnnnnnnnnnnnnnnnnnnnnnnnnnnnnnnnnnnnnnnatctaataccattaagatagtgcaatacatttctgtatttcacatcttgatccccccaccatgcatcattgggattgatcaatgatgcatagataggtgagtagtcaattaatgacttcaaatactgatacgcttcttccggtttcgttaatatttttctcattgaggaaaaaaggttgttcttagtaaccattcttctctgtgaattatagtgatatctaatgtaatcagaaacattgctctctccaagttgaacaatcatttctgaccattgctcgtccaaatcgttgagctcttcttctccgatttgatcatctttcgtcacaattgaaaacaaatagttttttagtaggtccggagtagacaattggacccctctcgcattcaaagtttcaaaaactttataggcattaagatcgtcttgtacaattatctttgtaaaaatcatacttgaagaaaaatctgcaataaactgagcaatctccgcacnnnnnnnnnnnnnnnnnnnnnnnnnnnnnnnnnnnnnnnnnnnnnnnnnnnnnnnnnnnnnnnnnnnnnnnnnnnnnnnnnnnnnnnnnnnnnnnnnnnnnnnnnnnnnnnnnnnnnnnnnnnnnnnntttctatttagttctaatttattaattactttaagcgtaacgaagttcttacttcctacaaaattctgagttataccatcgagtcgctcagtattgccctgaacatcctccccgttatcaattaaagttttgatcgctttcattgcagccagaactataatcgataacgtaactaagcgttgttgcccatctataatttcatgctgatactgttctttttgttgtaggacaatatagcccatataatgaaaaccttcatcatcaagagaatttatatctccccataaatcctcccattgtcctacatcccatgcatagtctcgctggaatctaggcactatatatttgttaggcccaccgattaattcattaaaattctcattttttggttccatcaacataaattgctttgccatttaatcaaatcccgttattttaaagtgacgttatcataaggctgttaattattaacaagacattatgatgagagtttcatagctatgatgcacgataaacgattcgagcactaagagacacttctagtgctctacatcatcagagacaatcaacttggtcgcttagaacaagctttagaatggttaaaagttattctaaatatatctaaattactgactgaagcaactgtaacttagagcgcgttctgccaaaaatccccactggcgctgccggtgggtgacaacttttgacaactcaatctgaacgccagcgttcgggcaaaccagaacagcgatctgaaagaggctcgaggatggttgcattggggaagtgcttaacacctccccttcgcgagttcgtgtacctgaagttttctaaagcggcgcggtttacactttgccggcaggactaacagatactaacagccaaggctcaacaaatctcaacgcaagccctttacacttctactgtagctgctgttcgtaggcgttaggatccgttaggttgggttgacacttttccctgtttttcacgaaaagtgtcaagttagaggagttaggtttggccgggggttttacagtttctcacctgccagcagacagagtgcctttaatcctgtatcgctccagtcatcttgggtgtcgggatgcattgcggccacataggccagctcggaacgcaggaaacgcagaccaccagccatgtgatctttgccatagaagctgtgggtttcttcatccaaccggaagagaatcagcaattgttcatcgggctcgtgctgaacatcaaaacccagctcagcggctgctgcctctattcgctggccagcattaatatcagccggcaactctttcccgccgtcatgcccccatacccacgcggcggcctgcgcccacgtcattgcattgtgatgatcaccagcaccagcaccagcaccagcagaattttgcttcgcctgtgttgcttcaacatccactttatcgcctgatagcacaatctcaccacgtgctatccagccgtaaactgtttgtcggcttactcccatgtgcctggcataggctgatttgctcaataacataatttaccgttcctcacttctgttatttagcattctccagttaagaaaaagccgccatcaggcggcctgtttcccatcttcatcatctgctttaccctgtcgggaattaattttttccataccatcaatgtactcggacagattcgccagaccggagactcgaggagccacatcgcgagggtcgtcattgcttccaaataccagatttgcataccatgtgcgaacagcgatgatttgctgcaggttgcggttaatggcttttaccaggttagaaacagatttgataacggctccgttatctgtggctatacgggcaaaagtcagtcgctccagctgagaatctgttacgcctgagcaaatggcgttacctcgtagcagggcgtcacataaatcagtctgattcccggcatacattgctaccatcagcttttctttcgcagctccatccagcgagcgaaatacattccgtagctcgctatctcgcataaatccgacaacatcaccctcggccaacggagcaactggggccagtttggtcttaagataattgagaatattttcagcttgttcgctgatcatcgccgtacttctagtgaaagccgtgagtgtgtctctatttgccgcatctctggcccggcggttttttgctgcttcgtttaaatccggatcattgcggataacctctacggcatcggcttccgcctcagctaacattgccacggcccgcagatcaccaaaaatattcgccatccctttaaaaagaatcgccatctgctcattaggcgcaaccacttcagaaacgttatcagtgatagcaatgcttctttgcccaattttaatttcgtaactcactggcttacctccattctggatagcccaacatcaaatatttttctcgccacatcatggattgatggtgcgataccaaacccggatttctggcgttcctgctcctggatggcttttaatgccgcaacctgagcagcgctcagaagaatgggtttcacgtgttcctttttcatgcttcccccttggttatcacatgataaaaaacgcaacaatcacaacaatcacaacaatcattgcaagtaatgaaatgatggtaatgaaatcgaggggatgcacaacgtgaaatgaatggatgcgttttaaagaatttgccctcaaggtatacatggtgttcataaaggctataaattgcttataaaacataatattaacctatgaacaccagcctacattttgggatttcaggtctacacggtatacatcattctgtttaataaacgatcagatggttaatgagagaatgaacaccatgtacaccctgtgtatacctgaaaacaaggtatacatggtttatttcactgatttatatataaattattctctcgatgtataccatgtatacctttctccatatttatctgaacttcattctttatgaccggctacaggatgcgtctgaggtaaccagtcttccgcactctctgaaagttcaacgttggtcaccatgccacgggctctccgttccttacggtactcgtgattaaactccctcatcgcgctttccatcccctctgcgaatttattcagcgtcagcggcttgtcgaaaccgttggcttccaggaatgccaggtaagcgtgatagagataaattcgcggatagtgaggcggattgcggtttcctaccatcattcccgcacaatcagccagccgctcaagatgcgcgcagaaggcataaagcggatccgttttctgcttcacctccagtgcttcttcgctgttccgttgctccagcagcagcgcccgcgctttttccgggttcgcaaagttcgccagcagccgacgaaccaccaccggaatttcagcggatatcttttctgccaggtcgggatctttatcctcctcgctgacgcgccggttaaactggaaaattacgcgtcgccgggaaacgccgccggcacgttcggtgaaaatcatcggcgtgttgttcgtggccacaaccaccgcccgcaaaacggcggtgtactggtgctcgtgtttcgggtcgatctccacggcatccccgccggttatcgcttttatcccggtgccctctcctgaatatttgggctgatcaggaagcgttatcatgcttttcccgacgaactgcgcccgcccgcgcgcgctgtcgagcgccgccatgttcccgctggcggtgttatgcgcaccggccagcatcgtagcgatatgggtaaagacacttttcccgctaccgccctcaccggttatctcgaggaacagctgccagtcgtaccggttcgccagcaccataaagagcgctgcagcgatgcgctgcatcttaattgcgtctctatctgatgcgtaacttagccatttatggaagttcggcgcgtggtcgcggaggttttcgcccggtaccgctggcgtgtaggtcacgccgttatgattggttagccagttgtcctggctgtgttcggagaaaatgccggtttccatatcgtagacaccgtttgcaaaggggatcaggctccgccgcggctcccccatcaccgggataacgattttcagggcgtcgataacgttgttgatcgcgcgcttgctgaagttggttttgttctcgttgtagatagccaccatttcgcggctcagctcgagcatagacgttttctcccaaatgccggcgcggtagacgtacacgccctcgctgttttcgttgattgcaatgccggtgtaacgcgcggccagtatgagcgccttttcgttatcagccaggtcgcggaggtttacatccgtcagcggtttgccgatcaccatacttttgccggcttccgcatcggctttgaggcgcggcagctgcggcgtccagtcctccagaagctgataaccttcagagtagaattgcgcgcgctccacgccggccaccgccagctttgtcgcgagaatggttatctgccgttcggtcagatgcccgccgcggcaaacccgggcatagagccggccatcatcaacaatgcggatattctccagctccgccagctgctttttatccagcacaaccggcggcaccgtgtcgccaatcgggttcatttcctgccatgctttggcgaacgtccaggcatcggcgccggcaaagatgattgactcctccatgagatccgccggctgctttttaaggtttggtgcattcttcattttctgttccctcgctccctgatgatttcccgcatgacacgaattcgctcgatgccctgtacccgcataatccgatcgatatctttttcgccggcgaccggcgcggaagaaacaaattcaaattcccgcaccagtctttctggcgtgcaaaaacacggtgagctgtacccctcgcggcaatatgtcactctgtcgaatcggtaactttcgataattacgatgctgccccggctgtccttccatttatcgcccggcctgatttcagggtgagcgcggccaccagcagctaagccggaaattttaatcgtcatattttttacctcacgccgctggcgggattacctgataaccaatcttcttcagaaagcgcgcggcactctccaccgtgaaaaggatctcgtcgtccataagggggcgcatcgactgcaacccgttcgacgtgtccaccagatagcggccgccggccggaaaactgaatacagttttgccatcgctacagcgcaccagattataaatagcggtcatggtctgacctccctgactttcaccagatattccgatgcctgactgaccaggctgtgaaccgccgcgacacgaaagctttccatttcatcatccggcgccagggtgtttatccacatatcgagaacggcaagcgcctgacggctgtattcaagcgcctggcctgcgctggtcgtcagcatggcaatggattcgttttgagttggctttgtcatgcattcacctccatagcgaggcgtgtctggatagccgcggccttgctccccagctggagataagtccgggtgattgccgggttactgtgtccgagcatttcagaggcgaccagcaagccctgttcgccgccggcggacatgagattaaaggcggcaattttgcggctggaataggcgctcaggcgcagacgcgtgtttactacgcgggtaaaccacaccatgacgttgtgcagtttcttccagatcgtctgacggctaacgctaccttccagagactggcaacggttactttcaatctggctgcgggaaaataccaggtcgtcaccgataagattgcgctccatgcgttcgcgcagccgcttgatgatgcccggcggcagctgtttggtgtcgtgcttaacttcagcctttgccaccagctcaaacacgatcgcctgttcttctcccgtcatgccggcggccagttcgtcgcagctcacgctatcccagtgcatgtacccaatgtgatcgccagcaagccgggcagcgtccttgcgctgctggcgaacaatctcgatccccttccgggtcgctctggcttccgctgctttggtctgcttcgctacgatgatcgttgcaataccggtttcccagttgatgcaggagtaacggaaattgcacacgtcgctggtacgccagccggtaacggtcgcaatatcccaccagagtaaaacccagtccggctgggtctgctggatgcgttcgcgcagtttgcgctgctcttcccgttcgtaaacgggcgtcatggtgcgcgtgcctttcgtggtcgtggcttttaccacgttgccgcgcagctcgcgggctttagctgtcagggtctggaggttaagcatggctacctcccaatttcgcaacatccagttcaaacgcgccgctactgtactgataaagcgaacattcagagcgaattttggcggcaaagataagatcccagcgggaataaaactcgcgggcttcttgctcactgtcggcaacgatacggataacaacgggagtgcaggtccggcctttcggcgtaccgaggaaaagccaggtgaatttgggcagtttttgggttggggtagtagccatgtggcagcctccttttgcttactggagtcaccacttgagttctcacgctcataaagggtggtgacactgacgggggtgagaataccggtgcaaaaggataccggccagcctttcggctgccccgccagcgccaccatagattcgatgcggatcttccccgctgaatgaagatgtactggctttacgacacaaaaaaagacgctataggcgtctggtatcgccttttgcttatccgggttctcacgcccgacaccagattttgctggtgcttttaaagcatacccttcagttgaataacaaggcaaggagtttttagggtgagcgaagccctgccccagacgggcataattgttcttcatggcattaacctttttgaattgtttagtgagctgtcgcgacaaacgtattctgcgagatccgaagtgcaaactctcgcaaattatctctgctcacggaatctcagttcgtttggctgcgtgacgattcaatgcgctcactaatccattcatcaatttcgctttcaatgaaagcaattgctcgagaaccaatctttatggatgaggggaaacgttgctcagccatgagtcgatagatccaagccttgctatagccggttctgcgctgaacttcaggtaagcggataagggaatgggacatatatacctctcgaagtctaatgtggtctacgaggtatatttcagcaaaaacatgcgggtagttgtggaagtcacggtaaatcagttggaagcagctcttccactgaaatagaagtacggtcagaagttttagaacctgtagatcgactttttggaaatcctcacgagctatttggaagcgtatgtgttcagagcttcattaattagcatagtcaatgccttatctgtcacatcgatgccatcgccatgttccaatatgcttcttgaagcactcctagcaacttcggatttgttcaaatttttaccgcgaacatatttaccacctgatttttcaagcgcaatagccattccagcgatcagttttaacgctgtatctttaccagcaaactcgccccacccgcttcgtaaaggctggtacttttcgctaaagctatctggatcacatccaaaccaactatctgtagctgatatttctttaacagcccaaggccaaatatcattggaataaaaatcagctccagtgatatctccgccaggtgagctagaccatgttctcttgggatgtagttcttctgcgtttacagcactcaaaattatcctcaagtaactggaagcaatgttgtagatctcaggagggaatttagctttcaactcatctaagcgtgaacaactgtacacgccagccatagccattgcagcctgctcagcagtgaccacacgttgtcggcgaagatgatggggcatgttgaggatgttttctcgcataaaagcttcctgctaacgatagtctacagaagtctactactgtcaattagcactgtctatacatacagttaagcgcttttcccgaatgttccatgcactacattttcaccgttatccaacgcttccatatagtcggcataccactgaagcatttctcgccggccgtctatgtactgagcgtggttgtacgttcctcgaatagagtttttgtcgacgtgtgccagctgcgtttctatccacgcggtgttgtagccctgttcgtgcaggatggtactcatggtgtgccggaaaccgtgcccggtgacttttccgtcatagccaatacgcttaaagacttggtttatgctggcttcactcattgtttttcgcggatcgttacggccagggaacataagcgggtaattgcctgttagctcttggagctggccaataagcgtaagagcttgcctggacaacggtaccacatgagggcgacgcattttcatgcgtgaggctggtatttcccaaaccgccttactgatattgatttcatcccaaaatgccccgcggagttcgccggtacgcaagccggtgataatcagcagacgagcagccaaaactactaacgcgcttcctgtatatcctgacaacgccttgaagaaatcaggcaattctttcggtgtgaggaaaggataatgattggactcatgcccttgcatggcgctggtgagatccggagcggggttatactcagcacgcccggtgactattgcgtaacggaaaacttccccgcagcgctgcctaacttttttggccttttctgtagcgccgcgcccctcaatgcgccgcagcacattcaacagttcaagcggtttgatatcggctattggttttttgccaatgtaagggaacacatctttgttgaaagcctccaggatgtctgaagcatacccagcagaccatttttttagtttgctgctgtgccactcaagggcaatatctttgaaggtgttgtttaactgcgtttcacgggcgatcttctcttcccgtttcgcttccataggatcgatacccccagcgataccccttttggcttcttcacgttttgcccgagcatcggccaatgtgacttcaggatacacacccagcgctaacagcttctctttgccggctacacgatacttgagccgccagtatttgccgccattaggtttaatcaggagatacaaaccaccaccatcagccagcttgtaaggcttatctttaggtttggcggtgtccacctgccgggcgtttagtttcatttgggggtacctcctctagaccgaacagcatatacccccataagtacccccaaacgaatgtagatttcagggaactttagtagacgtagaaatactaaaaggggctgtaaagcgcagagtataaggggtttcagtgaactttagtagacttggggagacgttagaatggtgccgataataggagtcgaacctacgaccttcgcattacgaatgcgctgctctaccaactgagctatatcggccctgcaagaggtgttcacgagggtgaatcacgaggcaaaaggttagaacttagcgggcgatgcgtcaatagccagtggaatcaactgcctatttttgcatcgcccgttctcatttacgcacgaatggtatcgtcgccgaaaccaatccacttataggtggttaacgcttccagccccatcgggccgcgggcgtgcagcttctgggtgctgaccgccacttccgcgccgaggccgaactggccgccgtcggtgaagcgcgtggaggcgttcacatataccgcggaagagtccacttcattgataaagcggttggcgttacgcagggtgcgggtcaggatggcgtcggagtgctgggtgccatgttcgcggatatgggcgatagcctcatccatatcagccaccactttgacgttcagatccagcgacagatactcgtcgtcatactgctccgctttcaccggctcgaccttcgctgggccgttttgcagcgcggggagggcggaaggggcggcgtgcagggtgacgccgctctcggccatctgcttgctcaacgccggcaggaaggtatcggcgatgttgcggtgcaccagcagcgtttccacggtattgcaggtgctcggccgctgggtcttggcgttgacgatgatcttcagcgcgggggcgatctcggcggtttcatccacgaagatatggcacacgccaatcccaccggtgatcaccgggatcgttgactgctcacggcacagcttgtgcaggcccgcgccgccgcgagggatcagcatatcgatgtatttatccatcttcagcatttcgcccaccagcgcgcgatccgggctctcgatagcctgtaccgcggcggccggcagaccgcactcctgcagcgcctgctggatcaccttcaccgtggcggcgttggtgcgccaggtctctttcccgccgcgcaggatcgccgcgttgccggttttcagacacagggaggcgacgtcgaccgtcacgttaggacgcgcttcataaatcacgccaatcacccccagcgggacgcggcgacgttcaatacgcagaccgctgtccagcagcccgccgtcgatcacctggccgaccggatcggccagattgcacacctggcgcacatcgctggcgatgccgctcagacgcgccggggtcagcgcgaggcgatcgagcatcgcttcactcaggccattggcgcgagcttcggctaaatcttccgcgttggcgcgcagaatatcgtcggtctgcgcttccagataatcggcgatcttttccagtacctgattcttttcccggctggagagtaacgccagctgccaggaggccgctttggcggcaatgcccatttgttccagcattttcagctccttaacggatgatcatatcatcgcggtggacggccaccgggccgtattcatagcccagaatggcatcgatttgctgcgagtgctggccggcgataaggcgcagcgcatcgctgttgtagcggctgacgccgtgagcgatgtcgcgtccttcgctattgcggatgcggatcacttcgccgcgggagaagttgccgctgacgattttgatgccttttggcaatagcgagctgcctctttcgaggatcgcctgggtcgcgcccgcatcgacggtgatttcccccgccggcggcgcgccgaagatccagcgcttacggttctccagcggagactcctgggcgtggaagcaggtacctaccggcaggcctgccatcgcatggccgatgacgtccggacggttcccggcggcgatgatggtatcaatccccgcccggcaggcgacgtccgcggcctgcagcttggtgcccatgccgccggtgccgagtccggagacgctatcgccggcgatggcgcgcagcgcgtcgtcgatgccgtagacgtctttaatcagctccgcctgcgggttgctgcgcgggtcggcggtgaacaggcctggctggtcggttaacagcagcagcttatccgccccggcgaggatcgcggccagcgcggagagattgtcgttatcgcccactttgatttccgcggtagcgacggcgtcgttttcgttaatgaccgggacgatgctgttatccagcagcgcgcgcagagtgtcgcgggcgttgaggaaccgttctctgtcttccatgtcggcgcgggtcagcagcatctggccaacgtgaatgccatagatagaaaacagctgttcccacagctggatcagacggctttgtcccaccgccgccagcagctgcttggaggcgatggtggcgggcagttccgggtaaccaaggtgctcgcgcccggcggcaatggccccggaggtcacgatgacaatacggtgtcccatggcgtgcaactgtgcgcactggcgcacaagctcgacgatatgggcgcggttcaggcgacgggacccgcctgttaaaacactggtgcccagttttaccaccagcgtctggctttcactcatgattctctgccgttcaaaaggaatatcgatatcgagctgatgttgtagcaggagtcggcccgcttgccaacacccggggcggcgggcgcgccattttattgcgcgggatcgggcattctggagagggaatgtgacaaaaatatgtcagatacatttaaatacccttttttataaaaagttccatcttgtcataaatatttaatatcccggcgttaaaaaacctccagtttttgatgggcgagcgcccgcaattgaatagcgcgtataaataaatcaccaggactgaataatgaaaaagagtactctggcattaatgatgatgggctttgtggcttcaacagcgacgcaggcagcggaagtttataataagaacgcgaacaagctggatgtgtacggcaagatcaaagccatgcactatttcagcgactatgacagcaaggatggcgatcagacctacgtgcgtttcggtattaaaggcgaaacgcagattaacgacgacctgaccggctatggccgttgggaatctgaattctccggtaacaaaaccgagagcgactccagtcagaaaacccgtctggcgttcgccggcgtgaagctgaagaactacggctccttcgattacggtcgtaaccttggcgccctgtacgacgtggaagcctggaccgatatgttcccggaattcggcggcgattcctctgcccagaccgataactttatgaccaagcgcgccagcggcctggcgacctaccgcaacaccgacttcttcggtctggtggatggcctggatctgaccctgcagtaccagggtaaaaacgaaggccgtgaagcgaagaaacagaacggcgacggcgtcggcacctcgttaagctatgatttcggcggcagcgacttcgccgtcagcgcggcctacaccagctccgaccgtaccaacgatcagaacctgctggcccgcggccagggttcgaaagcggaagcctgggcgaccggcctgaaatatgacgccaacaatatctacctggcgaccatgtactctgaaacccgcaagatgaccccgatcagcggcggctttgccaacaaagcgcagaactttgaagcggtggcgcagtatcagttcgacttcggtctgcgtccgtccctcggctatgtgctgtcgaaagggaaggatatcgaaggggtggggagtgaagatctggttaactacatcgacgtgggcctgacctactacttcaacaaaaacatgaacgccttcgtggattacaaaatcaaccagctgaaaagcgataacaaactcggcatcaacgatgacgacatcgtcgcgctgggtatgacctaccagttctgattaaccgcagaaccacccgccgcagccctggctgcggcttttttttagcggcgattcttcgccaaatgcagggtgtcgctgttcatggtgatctgcgcgttatactccttcggcagacgacgcgcctgatagaacgctgattcccagtaagggttgtccagcgaagagcgcatcacgccctggctgctcgaggcgtgaaggaaattatgatcggtatcgtaaaagccaacgtgcatcccggcccgggtgcggaagaacaccagatcgccgggacgtaaatcccgcttattgacccgcacgcccatgtgcagcagctcgcgggtggtgatccgctccattggcaggttaaagcgatccttcagcgtgcgccagacgaaacccgagcagtcgacgccgctttgttcagtaccgccccattcatagggggttccctgccaggtgtgcatctgatcatgcagggccgccaccacagggatcagatcgtccgatccgctatcaatggtcatatccgcatgagattttgtgttctttgcctgtttcggtgaggaggagcatcctgccaacaacaaaaaaggaattaaaaagagagcatgcgtcagttttggcttcatatcgttattttcgaagtagcaagcagactgctttgttttatagccgattaaaaaccacggctgaataagccgaggccgcctttacgtttatttacgattaaaaataaacaacctcgggatggatcagccataaagggcagttgtcactccgcaacggtctgtgccaggatgctgacaggaacatttcacgaggcattccatgacgcattacgccatctctagcgagactttgcccggcgccgctttcgacgcggggtggatgacgtctgcgcctcatcatcgcttcgccacgctctgcccaccgcctccccctccagaccgggtagttttcggcgcttaacgccgtctttagcaggcgcttacctgccggtatgacgcttgataccttgtgtttgacgttctggagcatgctatgcacgttcgctattctctgctcgcctcgcaggcgacaacggccctttttgtgctgctgtggggcagcgcggccatcttcacccgctggggactggataacgcctcgccgatggcgctgctggtctttcgttttctggttgccctggtcgcgctgacgccgctggctatcgtccgtcggcgctggctgcccgcgccgggcacccgcctgcagacagctgtcaccggtctgatgctgattggcggctattcggtctgttacttcgaggcgatggccaacggcgtgacgccgggacttatcgccaccatcatggggatccagcccatccttacgctttgcgtggtggagcgccgcctgcaggggcggcggctgtcaggactgctgcttgccctggcggggctggtgctattggtgtggcgcagcctggcggcctcgccgatggcgacggtggggatcctgtttgcgctggcggcgctgctgctgatgacctttggcgcgctgtggcaaaagcgcagccgtcaggcgccggcggatgtcctgccgctgcagtatgccgttagtctggggctgtgcctgctgattgccccgatcagcggcttccagtttaccgttaacgccgggttgattattccggtgctgtttctcgggctgctgatttcggtggtcgcccagctgctgctgtaccgtctgctgagcgcgggaaatatcgtcaatgtcaccagccttttttatctggtgccagcgatcacggcgctgctggattatctgctgctgggcaaccggctgccggcggcggcgatgatcggtatgatggcgatcgtcggcgggatcgtgctggtgttccgcaccgcgaaggtccgcgccggctgatggcgagccgggcgctgcggcgtccggttcattttcctgtcatcttttttacgcatgctcccggcagcttattttgaccagtaagggaagtaccatgggcaacacgctgacgatttttgatctcgataacaccctgatacagggcgatagcagtacggtctggagccagtttatggtttgcgaagggctggcgacgcagaaggggtatcttgcccgcgaggcgcggctaatggcggattatgaccggggagagatgaatatcgccgattatgtggccctgatccaggcgccgctggccggaataccgaagtcggacgttgacgcgctggtggcccgctgcgtacgcgaggcgatcctgccccgggtctatccgcaggcgtgggagctcattcgtcgtctgcgggccgagggagagcagatgctgattatctccgcctcggttagcctgctggtgcaggcggtggccgccgcgctggagatcgatcaggcgctgggtattgacgtggcgatggtcgacggcggctacagcggtgaaatcaccgggatccccagctatcagcaggggaaggtggcgcgtctggcgcagtggcgcgaggcgcatccgcagtatgacggcgaggtgacgttctataccgattccattaacgatctgccgctgtgcctgcatgcggatcgcgtgcggctggtcaatccctgtccgcagctgcaggcggccggtgccggatacggctggccggtgctgagctggcggctggaatagcggagcggataaatttttctacaggcctgtgggttcagtcgtcccaggccggataagccctgtaggccgggtaaggcgccagccgccacccggcgaaatatcggcgcaaccggaaatgtccctgcccgcgctgcgcttagcagggctaccatccagggctatttccgggcagattgcgctcccgatatgtcttctgcgctatgtcacttatggcgcctggagcgcacagggggcggccagtcgccgccgccccctgtacccccgggctccggccagcaacatcgccgctgcgcggtgccttcgacttatccctgcaggcttcgggtcgggccgaggcagcgtccctgcaaaacacggccctcagcccgcatccatgcgggctgccccggccttccgggaacgtctcagcgatgttgaggccgccagcaccggcagtttcagcagcccctgcgccagcggtgatttggggttgtaggccgggtaaggcgcagccgccacccggcataaacgcagctccgtgcctgatgccatcgcctggcggcgcagttgcttgccgggcctacagacagtcggagccggacgagtaggccgggtaaggcgcagccgccacccggcataaaagcagctccgtgcctgatgccatcgcctggcggcgccgttgcttgccgggcctggagacagtcggagccggacggggaggccggataaggcgaagccgccatccggcgcaaaggcgcgctagcgtccgccctgatacagcggcaccgcggcgccgccgatataacgacggcgcagccaggcggaaagggtgtccatgatcatcaccaccgccaccagcagcagggtgataaacatcaccacatcccagttccacagacgcatattctcggcatagataagcccgataccgccggcgccgacgaagcccagcaccgccgcggagcgggtgttggattcaatctgatacaggctcagcgcgaggaaggtcgggaacgactgggtaaaaatgccaaagcgatgcttttgcaggccattcgcgcccacggcggtcagcccgcgcccgggagatcggtccacggcttcgtgtccttccgcgtacagccttcccagcaggccggtgtcctgcatgatgatcgccagcacccctgccagcggcccgaggccgaccgcacgcacgaaaatcagcccccagatagccatgtcgatcccgcgcagcacatcaaacaggcggcgcatcagcagggcgagggtccccagcaccacgccgcgcatgatgttgcgggcggcgaagaaggagagcagcagcgccagcaccgtggcggtcagcgtcccggcgaagacgatggccagggtgacgccgatttgcgtaaagtaatagccgaacggccagttccagaagtcgtgccagacgaacatccgcgccaggtagcggccaatctgctgcaggccgatggtcagctgctcgccactgatgccgaactgcagaaaaaaccagacgtaatagagcacgcaggctagcgccaccagcccgacgtagagcaggtagcgcccctggacctgatagagctgcttatgctgccgccggctggcggcgagatccggttgcatgtgccagacgctcatttcttaccctccagtacccacaggcgcagacgaccggacagcatgtccagcgccgacaccaccagaatgatcagcagcagggtgatgctcacctgatcgtagcggtcaagcttgatgttggtcatcagctcctggccgatgccgcccgcgcccaccagcccgagaatggtcgacgagcggaagttgatttcaagccgcataaagccataggagagaaacagcggtttcacctgcggccacagggcgaagcgaattttctgcagcggggacgcgccgcaggccgccaggccgcgtaccggtttgttttgcgcgctttccaccgcctcgtagaacagtttggtcaggctgccgacggtatgcagcatcagcgccagaaagcccgggatcgcgccgatgccgaacgccatcacaaagatcaccgcccacgccagctcgggcatggtgcgtaaaaacgccaccagcacgcgaatggcaaagcgcaccggcgccggggaccaggcgttattggcggcaagaaacgcgaaaaccgtggcgatggcgactgccaccagggtcgaggccagcgccagctgcagggtttcccagatcagcggcagctggatcggcaggcgatagccccaccaggccagcgaccctttggtctgcacatcggcgaacaggttgccggcgctcaggggcgggatggtctctgccatatagtcaaagaaatggggcagcgagtgccagatagtcagcagattaaattccgcggcgctgccggcggcaaaatagagcgccagcagcagcagcgaccagcagacggcatcgcgcttttgccgcgagcgtacctgctggtaatagcgttcaaattcggtgtgggttgtcttcatgcgtcggggatcttcaacgtagcgccgccgcttaccctggggcaagcaggcggcgttgaggcaggattaacgcgcgctcaccagctcgcgtttcatatcaataatctgctggaagtcagccacgctgcccgggccgatgtgctgagtaccgcccatcgctttgataaagcaggcgtgatcctcggtgtccagctttttcactgccgccacgaccttcgccttaaagtccgccggcagcgcattgctcaccaggatcgggccgttcgggatcagcggcgattgccagataatgcggatctgcttcatcagatccggatgatccatgcgaatcaggcggttgaacgcgccggtagtgtagccggtgttgtaatcgccaaccatcgaggcccacgtgaccgcgcccgcgaactggccattcagcacgccgaggatgtcctgctcatggccgccggagaaggtgacgctggagaaggtgttgttgtatttgttgtcggcgttaccgccaaatttttctttaaacgcatggttagggatcagatacccggaagtggaatccggatcggcgaagccgaaggctttgccttttaaatcgtccagcgttttgtacggggagtcggctttgacaatcaccaccgagtgatagccgcgagactgatctttgtcgtccacggcgatgccgacgatatccaccgctttcggattattgagataaaccgaggcgtaggaggagggggacatgctcagcaccacgtcgactttgccccccaacaggccctggatcaccccggaatagtcggaagagttgcgcagtttggtatccacgttcagctctttatcgaggaaggccttcacgcactggttatcgccgatttgctgggtggcgttctggccgccgagaatgcccagattgagctctttcggctgcgccgccgctgcctgccatgccatcatcatgcccgcgaccattgcggataaacgaactgcgccagtcatatattttttcattatgttgcccgtgtgagtgaaattaatgcaattggctaacttcatcgccgtacagccgctgcagcacatcctgcgtcagccgggaggggtgatcgtcaaaaataagctggccgctggcgacgccgataacccgggtgcagtaggccctgaccagctctaccgaatgcaggtttaccatcacgctgatgccctgctcgctaatttcgcgcagcacatccatgatgcgctgagtgtttttcggatccagcgaggcgacaggctcgtcggccagcaggatcccggggttttgcattagcgcccggcagatcgccacccgctgcatctgcccgccggagaggttctccgcccgctgcagcgcgtgcggcagcatgttcatccactcaagcagcgcaatggcgcgcgcccggtcggctgcgggaaagattttaaacagcgatttcagggttgaagtctggctgaggcggcccagcaggacgttggtgagcacgtcgaggcgcggcaccaggcagaagtcctgaaaaatcattccgcagtggctacgccagacattgagcgcacggcctttcagctgtgagacatcgtgcggggtaccgacttccgggtagctaagaatttctccgccgctggcgctgtgggtgccgttgaggacatgcaggagcgtcgatttaccggcgccggagcggccaatgaccccgaccatttccccggcgtgcagatcaaagctgatgccgtccagcaccttgtgctgggcttgataagctttactcagattacgcacgcttaagaccttccgctgccggccggcagcgggatcggtgaacggctggaaatcagtttcggccaccgcggcaagagagctgttcataagagtgtccaggttcgtcattaactggccactattaataggtctttatatgaaatttcgatgacggtattgcgaacaaagcgtgaactggcgtgaaagagcgacggccagcggctcaacgcgtgcggcatgctggcggctggcgaagcgccgaaaagccgctatgctttggagggcgcggagacagaccggttcgtaggcgtaggcagccttcggcaatcttcgcttaatcttgatgaagaagaccgtttaatcgaatagataatgcgtctgcctttgtttagcattcaacatcccgcatgtattaacatatacataactattttgtgcggcaggttaatctattcatgagtcttatgtgttggtgaatcatcctggtttttgtttatttgtagatttatatcctttcttttgtgctaaatccggtttatttgataagccattcaagagttccattaagaatattcctaacataatagggcgaagatcctggataatataaagcgcagataagaattgacggttatattaccaataaccttatgaaaataaatgtctttttctggcgctcaaaaatttgatattttcagtttttgtaaatattgacctgggcgcgaaattcattgcctttccgcatgttgacactccataggaaaaaacttaaattcaacgccaagcagaaaataattatagtttaatcccccgcttatccaatattgataagtaatgcgtgtcttatttaatggcgatttattaaaggaaacgaatacgccagtaaactttataggcctggcaagcagtgacgttgtaaaaatgattacttcaaggactatgaggttaaaaactatatggaatataaaagctgttccgataagtatatttggtctgccgatgactcctatttctataaaggactgtccgaactgattgtagacatcgacgaattaatttatctctcactggagaaaatcagaaaagattttgtgtttatcaatctcaatacggcttcattaaacgaatttatcaggcgcgacagcgaatggctatccgcggtaaaggggaaacaggtcgtattgattgcggccaggaaatcagaggccttagcgaactactggtattacaatagcgatattcgcggcgtggtatatgttggtctgagtcgcgatattcgaaaagaactggcctatgtaattaatggcaggtttctccgcaaagatattaagaaagataaaattacagatcgggaaatgaaaattatccgcatgaccgcccagggcatgcagccgaaatcgatcgccagaattgaaaattgtagcgtgaagacagtgtatacccatcggcgtaatgctgaggccaaactgtattccaaaatatataagttagttcagtaacacccaggcaattctgttttttaaatggttcaccgggacatcatgtccttaattcaactcaggatgaaaaagcgatgaaaaaaaaggttctggcaatagctctggtaacggcgtttaccggtatgggcgtggcgcaggctgctgacgtaacggctcaggctgtagcgacctggtctgcgaccgctaaaaaagacaccaccagcaagctggttgtgaccccgctcggcagcctggcgttccagtacgccgaaggcattaaaggctttaactcgcagaaaggtctgtttgacgtggcgattgagggggacacaacggcgaccgcctttaagctgacctcgcgtcttatcaccaacaccttaacccagctggatacctccggctccacgctgagcgtgggcgtggattataacggcgccgcggtggaaaaaactggcgataccgtgatgatcgataccgccaacaatattatgggcggcaacctcagcgcgttggctaatggctacaacgccagcggccgtaccaccgcgcaggatggtttcactttctccatcatcagcggcaccaccaacggcaccaccgccgtgaccgattacagcaccctgccggaagggatctggagcggcgacgtcagcgtacagttcgacgccacctggaccagctgatccttctgatgcaccagcagggggatctccccctgcttttttcacggacggaattgttatgaaaaagcaccttctggccctcgggctgctgcttgccggggtgtcgccggcgcaggcgctggatgtcggcgatatttcatcctttatgaacagcggcagcagcacgctgagcaaaacgatcaagaacagtacagacagcggtcgactgatcaatatccatctcgaacggctctcttccccgctggacggcgggcaggttatcccaatggacaaaccggatgaggtattgctcactcccgccagcctgctgcttcccgcccaggccagcgatgtgatccgcttcttctacaaaggcccggcggatgacaaagagcgctactaccgcattgtctggttcgatcaggcgctcagcgatgcccaacgcgataatgccaaccgcagcgcggtggccactgcttccgctcgcatcggcaccatcctggtggtggcgccccggcaggtgaactatcgctttcagtacgccaacggctctctgaccaacaccgggaatgcgacgctgcggatcctcgcctacggcccctgcctgaaggccgccgatggtaaggaatgtaaagagaattactacctgatgccgggtaaatcgcgccgttttacgcgcgtggacacggcggataaaaaaggacgggtggcgctttggcagggtgagcagtttgttcccgtgaaatagacagctgtgcagatggataacgacgatgcctcaacgatggattaccccaggactgaaaacgcggcttgccttcggcatgatctttttgttcgttcagcccgacgtcagcgctgctgccgcaggcgcgcagcagattggcggggtgattattccgcaggccttcagtcaggcgctgcaggacggcatgagcgtcccgctctatattcatctcgccggcagccagagcagccgggacgatcagcggatcggcagcgcctttatctggctggacggcggccagctgcgcgtccggcagatccagctggaggagagtgaaggtaacgccagcgttagcgaacagacccgccagcagctgattggcctggccaacgccccgttcagcgaggcgctcaccattcccctgaccgacagcgcacagctggatctcagcctgcgccagctgctgctgcagctggtggtcaagcgcgaggcgctgggcaccgtcctgcgctcgcgcagcgaagatatcggtcagtccagcgtcaacgctctcagcagcaacctgagctataacctcggcgtctataacaaccagatgcgtaacggcgggagcaacacctccagctacctgtcgctgaacaacgtcacggcgctgcgtgagcatcacgtggtgctcgacggctcgctatacggcatcggcagcggtcagcaggacagtgaattatataaggccatgtatgagcgcgatttcgccggccaccgctttgccggcgggatgcttgacacctggaacctgcagtccctgggaccgatgaccgctatttcggccggtaagatttacggcctttcctgggggaaccaggccagctccaccgtcttcgacaacagccagtccgccacgccggtgatcgcctttctgccggcggcgggcgaggtgcatctcacccgtgacggtcggttgctgagcgtccagaacttcgccatgggcaaccatgaagtggatacccgcggcctgccgtacggtatttacgacgtggaagtggaggtgatcgtcaatggtcgggtggtcagcaaacgcacccagcgggtcaataagctgttcagccggggacgcggcgccggcgcgccgctggcgtggcaggtatggggcggcagttttcatatggatcgctggtcagagagcgggaaaaagacccggccggcgaaagagagctggctggcaggcctttcggcctccgggtcgctcagcaccctgagctgggcggctacgggctatggctacgacaaccaggcggtgggggaaacccgcctgacgctaccgctgggcgagtcgatcaacgttaacctgcaaaacatgctggccagcgacagctcgtggagcagcgtcggcagcatcagcgccacgttgcccgggggattcagttcagtgtgggttaaccaggagagaacccgcattggcgatcaattgcggcgcagcgatgccgacaaccgggcgatcggcggcaccctcaacctgaacgcgctgtggtcgaagctggggacgttcagcgtcagctacaacgatgaccgtcgctacaacagccattactacaccgcggattactatcagacggtctacagcggcgcctttggctcgctcggcctgcgggcggggatccagcgctataacaatggcgacagcagcgccaacaccgggaaatatatcgccctcgatctgtcgctgccgctgggcaactggttcagcgccgggatgacccatcagaacggctacaccatggctaacctctcagcgcgcaagcagtttgatgaaggcactattcgcaccatcggcgccaatctgtcgcgggccatctccggcgataccggggatgacaaaaccctcagcggcggcgcgtatgcccagttcgacgcccgctacgccagcggcacgctgaacgtcaacagcgcggcggacggctacgtcaacaccaacctcaccgccagcggcagcgtcggctggcagggtaaaaatatcgccgccagcggacgaaccgacggcaacgccggggtgatcttcaacaccgggctggaggacgatggtcagattagcgccagggttaacgggcggatcttcccgctcagcggcaagcgtaactacctgccgctctctccctatggtcgctatgaggtggagctgcagaacagcaaaaactcgctcgacagctacgacatcgtcagcgggcgcaagagtcatctgaccctttatccgggcaacgtcgcggtgattgagccagaggtgaagcagatggtcaccgtctccggccgtattcgtgcagaagacggcacgctgctggcgaatgcgcggattaacaaccatatcggccgtacccgcaccgatgaaaacggcgagtttgtcatggacgtggataagaaataccccactatcgatttcagctacggcggcaataaaacctgcgaagtggcgctcgagctcagccaggcgcgcggcgccgtctgggtcggggatgtggtctgcagcggcctctcgtcgtgggcggcggtgcagcagtcaggagaagagaatgaaagttaatgcactgatggcgctggcgatcctcgcgctgctctggccggcagccgcgctcagggcggcggtgaccaagaccacctggtcggatgcgccggcgcgcgagtttgtgtttgtggaaaacaactccgacgacaactttttcgtcactcccggcggggcgctggatccgcgcatgaccggcgccaaccgctggaccggcttaaaatacaccggctccgggaccatctatcagcagagtctcggctatatcgataacggctacaacaccgggcttaatgccaactggaagtttgatatgtggctggaaaactcgccggtttcgcaccccttaaccggcctgcgctgcatcaactggtacgccgggtgcgatatggccaccagcctgatcctgccgcagaccaccgacgccagcgggttctatggcgcgacggtgaccagcggcggcgcgaagtggatgcacggtatgatgtcggacgcgttttatcagtatctgcaacagatgccggtcggcggcagcttcacgatgaccatcaatgcctgccagacctcggtgaactacgacgccagcagcggcgcgcgctgtaaggatcaggcctccggcaactggtatgtgcgcaacgtcacccacaccaaagccgcgaacctgcggttgataaacacccactcgctggcggaggtgtttatcaacagcgatggcgtgccaacccttggggaagggaacgccgactgccggacacagaccattggcagccgttcaggattaagctgtaagatggtaaattataccttgcagaccaatgggttaagcaatacgtcgatccatattttcccggcgatcgccaactcgtcgctggcctcggccgtcggggcgtatgatatgcagttcagcctcaacggcagctcatggaagccggtgagcaataccgcctattactacaccttcaatgagatgaagagctcagatgcgatctatgtgttcttctccagtaacttctttaagcagatggtgaatctcgggatcagcgatatcaataccaaggatttgttcaactttcgcttccagaacaccacctcgccggagtcaggctggtatgagttttccacctccaatacgctgattatcaagccccgtgatttcagcatcagcattatctctgacgaatatacctcggcgccgtcgcgggaggggtatgtcggcagtggtgaaccggcgctcgatttcggctacatcgtcaccaccagcggtaaaacggccgccgacgaagtgctgatcaaagtgaccggaccggcgcaggtgattggtgggcgctcctactgtctcttcagctccgatgacggtacggcgaaagtgccgttcccggcgacgctctcttttatcacccgcagcggcgcgacgcagacctacgacgccgggtgcgatgacagctggcgggatatgaccgatgcgctgtggctgaccacgccgtggaccgatatctccggcgaagtggggcagatggataagaccacggtgaaattttcgattccgatggataacgccatttcgctgcggacggtagacgataacggctggtttggcgaagtcagcgcttcaggagagattcatgtccaggcgacgtggcgcaacattaactaaggccctgctgacgctgagctgcctgctggcggcgccgctggcgcaggcgatctcggtcggcaatctgaccttttccctgccggctgaagcggatttcgccagcaaacgggtggtcaataacaataaaagcgcgcggctgtaccggatcactgtcagcgccatcgaccgccctggcggcagcgaagtgcgctcccggccggtggatggcgaactgctgttcgccccccgccagctggcgctgcaggccggggagagcgaatatttcaaattttattatcatgggccgcgggataaccgcgagcgctactatcgggtctcgtttcgtgaaattcccacccgtaacctgacgaggcgcagcccgaccggcggcgaagtcagcatggagccagtggtggtgatggataccatcctggtggtgcgcccgcggcaggtacagtttaaatggtctttcgataaggcggccgggacggtgagcaacaccggcaatacctggtttaagctgctgattaaacccgggtgcgattcgaccgaagaggagggcgacgcgtggtatctgcgtcccggggacgtggttcgccagccggcgctgcgccagccggggaaccactatctggtctataacgacaaatttattaagatcagcgatacctgtccgctgaagccccgtcccgcggagtgagccttatctggtggtcgcgcggcgggtaaagcgccggctggccagcaggctcagaccgcagcacagcaggtagtacaccgcgccggtgaagacgaagatcgccaggggatagatctgcacccggttgttgacctggccggccacggtggtcagctccgggacgttgacgataaacgccagcgaagtgtccttcagcaggccgataaagatccccaccagcgacggctgaacgttgcgcagcgcctgcgggagcagcaccaggcgcagcgtttgcccgggagcgaacccctgggtcagcgccgcctcatactgtcctttcggcagcgactgcagcccggccagcaccgagtgcatcaccgaggcggcggtaaaccacgccagcgccagggtcacggtcaccgcgccgggcagatcgccgccggtcagcatcggcagcagataccacagccagaagatgacaaatatcagcgggatgccgcggataatttccgcccacagaaacagcagacgccgcaccagcccgccgtagcgccaggccaggcccgccagcgcaatgcctcccggcagcgccagcagggtggcgccgatggccatcagcagggtcagcgccacgccgccgggctggccctccgccagtcggccccacagcaggtaatcgaggttatcggcgatcaccgccagattagcgttcatgtcgggcgctccgttgcagttttcttcccgggccgagacgcgtgagcgccacgcccatcgccacccccagcgccaggtacagcgcggtgccgacggcaaacgcctccagggcgtgcgcgttatagctctcaatctgccgcacctgataggtcagttccgcaaagccgatgccgctggccagcgatgagagtttcatcaggttaagatactggccgacaatcggctgccaggcgttggccagcccctgcggcaggaggataaagcgcagctcctgccacggcgtaaagccctgcgacagcgcggcttcccgctgcccgtggctgacggcgcgcagtccggaggcgatctcttccaccagaaaggcggaggtaaagacccccagcccccacatcgagcagaggaactccggcgtcagccaccagacgttacccggcaaaatggaccaggcgtgttcgtcgttcaccacctccttcaccgccagcggcagcaggttccaggcggcaaagtaccagaacagcagctggaccagcagcggagtgttgcgaaacaacgagacccacgcggccaccagtccgcgccccgcgcgtccgccgccgaggcgcagggccagcagcaggaccgccagcagggtggcgagcaggatcccggcgacgctgacccagacggtggtgagaaaaccagagataatccattgcaacggctgcccgctcaggacgccgtgccagtcaagcatcggcgtcactcgaggctctcctggtgcagcggatccagcaccttctgcagaaaacgccgcgcgcgggcatgctgcggatgggcgaaaaactcagccggcggggcgacttcgaggatgtcgccgccgtcgataaacaccacccggtcggcaatttcgcgggcaaactgcatctcgtgggtcaccaccagcatggtgatcccgctgtgggcgagggttttcatcacctgcagcacttcgccgatcatctccgggtcgagcgccgaggtgggctcatcgaacaggataatctgcggcgaggaggccagggcgcgggcgatggccacccgctgctgctggccgccggagagctgcgccggcatctgctgcgctttttcttccagtccgacctgacgcagcagcgccagcgcccgcgcctgagccgcgcttttttcccagccatgaacgcgctccagcgccagagtgatgttctcctgcgccgtcaggtgggcgtaaaggttgaactgctggaagacaaagccgacgcggctgcgcagctggcgcaaggcgctgccgctcagccggctggtgggtttgccgtcgatcaggatctcgccgccgcttaaggattcgagctggttgatcaagcggatcagcgtcgattttcccgatccggaagggccgaggatcgccactacttcgccgggctggacctgtaggttgatggcgttaagtacctgatgatcgccgtagcgcttggccacatcacggaacgtaatgctggcgcgctgcagacgtgaaaaatccgcggccggagccgcggagtgggagagtaaacccgagaacatattatttcgcttctatggtaaaggcgcgcggctgcggcgttttagtggcagggccaaaccagacatcgtaaattttcgcggcttcgccggttttctccagcttcaccagctcatcgttgacggccttcagcagggccggttcgcctttcttcacgcccacgccaatctcttctttgctgagcaggtcgggcagaattttaaacttggctttatccggcgcttccgccagcagaccggcgaggatggtgctgtcctgggtgatggcctggacgttgccgttgcgcagggcggtcagggccagcggaatatcgtcataggagaggacgcgagcctgcgggaaacgctggtgcagggcctgttcgccggtggtgcctttcaccgcgccgatgcgcgctttgctgtactcatcgagcttatccggagagccggccggcacgaggaactgctggccggtgacgaaatacggcgttgagaaatcaataacctgggcccgctccggggtgatggtaatgtcggcgacgatcaggtcggctttaccggactgcagcagcggaatacggttggccgggttggtggccaccagctcgagtttgacgccgagcgctttcgccagcgcctgggcaaagtcgacgtcgtagccgacgatatggtgggttttggcgtccacggagccgaacggcgggttggcgtcgaaggtggcgacttttacgacgccggcggctttgatgtcagccagctggtccgcctgtgcctgcgaggcgagcagcagcatacccagcgccagtgcgatttttgtggttttattgcgcatagtttttcccctgaatcccngttttgttttgtggacatcacgctcccacaaattgcccgtcggcggcaaagaagaaaaaattcttatctataaccaaaaagaacttaacaaacctatgggtattctttatgcgccgctggcgttttaccaggacggcaacgactgccgggcggtcccctctccctcagggagagggccagggagagggtgataggaccgggggtaatatgcgccagccaggattgcaaattcggaattaatatttcccgcgcccggccaactgtggttgaaatagacccaggcgattcgcttcccgacagaggagaaaacgaaagtggcattgtggcaacggttaacgggctggctggcttttttgtccaacggtgaagccggacagcaggatacccagcgcgtcatggaggcgatcctgccggtagccagcctctacggcgtggacattggcaacgtggaaacccggtggttccgtcatgataagacatactgagcgacgcaggacgcgagaagcctactggaacgaggtgtgctttgtgtagcaagagactgcctgaggttgcggccttgcaggaggcgccgccgcagcccaggcagttttgaccatgcctatccccccagatacatccgcttaatttccggattagtcagcatctcccgcgccgcgcctgacaaggtgatccggccattctccaggacatacgcccgatcggcgatcgccagcgcggccgtcgcattctgctccaccagcagcaccgtcatattctcttcgcgcagttgcttaatgatgccgaacagctcgccgacaattttcggcgccagcccgaggctcggttcatccagcatcaataacaccggctcgctcatcagcgcccgggcgatggccagcatctgctgctcgccgccgctcatggtgcccgccatctgatggcgccgctccttgagccgcggaaagagggcgtacatgcgatcgcgcaggcgggcgtagccggcgagattattgtaagcgcccatgcgcaggttctcttcgatggtcaggttggtaaagacgcgccgtccctccggcaccagcgccagcccgcgacgcacgatctggtgggtctggctgcgtgagatatcgtcgttgaggaagctgacgcgcccactggagcgcaccaggttgacgatcccgttcagggtggaggttttaccggcgccattgctgccgatcagggtgacgatttcccggtcatagacgtcgatatcgacgcccttcagaccctggatcacgccgtaaaagaccttcagttcccgggcgttaagcataattggcttctcccagataagcggaaatgacgtccggatgctggatcgcctcggccatcaggccgctgaacaacggcttaccgtactccagaaccatcacccgctcgcacaggcggttgacgaagggcatatcgtgctcgattaacaggacgctgagctgatagtcatggcgcatgcggaagatcagctccgccagatcctcggtctccttcgggttcatcccggcggccggctcatcgagcaggagcagcttcggcgcggtggccagcgcgcgggcgatctccactttgcgctggttgccatagcttaggtttgtggcctgcatatgggcgaagtgggcgatgccgatatcctccaggatggccatcgctttggctttcgccgcccgctcggccggaaagtagcgaccaatatgcagggccgcctccagcagcgaatagcggctggcgcggtcgagtccgaccatcacgttctccagcaccgtcatggagttaaacaggcggatattctggaaggtgcgggcgatcccggcgttcaccacctggttgggcttcagccccttcagcgacgtgcccgccagggtgacgctgccgctggtgggtttatagttggcggtaatgacgttaaacagggttgttttgcccgcgccgttagggccgataaggccaaagatctccgcctcgtcaacatggaagctgacgttgtcgatggcccgcaggccgccgaattgcatggtgacgtcctgcacctgcaggataacgttattttccgccatagccgccgctccttcttccggtctgccaaatctcttttttccccaacagcccctcgcgggcgaagagcatgatgatcagcaacagcagggagaagaccaccattcgcaggcccgggtacgcgccgagatcgtgaccgaagaactgcagcggctgatcgaggaagcgcagccactcgccgctgccgaccaccagcacggtgccgagcagggcgccggtggtgctgccgagcccgccgaggacgataataatcagcagctggaaggtgagcataaagtcgaacagccccggggaaatggtggtcagcagggaagccagcagaccgccgccgatcccttcgaagaaggcgctggtggcgaaggcgcaggttttaatgcggaaggtgttgacccccatggcgatcgccgcatcttcatcgtcgcgaatagctttcatcatccggccatacttcgaccacaccagctggaggatcatgccggtggccagcagggcgaacagcccgcaccagaacaggagatgcggctgctgcggaatatcgttcagcccgatggcgccgttggtgatttgcgggttgttaatggcgaggatcttgatgataaacccaaagccgagggtgacaatggccaggtagtcgccacgtacccggaagaccggcacggcgaggcacaccgccagcgccgccgcgcacaggccgcttatcagcagggcggggaggaagcccgcgtgcaggctgaggatccacgggctgggggcggccatttcaaacatgtctaccttgctgtcgctggagaggatcagcagggcggtcacgtaggcgcccaccgccacgaagccgttcggctccagcgacagctggccggtcacgccgttgatcaggttgtagctgaccgcgaggatcataaagataaaaatggtgctgatgacacgaacaatgtagtcattgaaaaccacgttgattccggccagcagcgcgatacagatgacaataatggccaggttgcgcagctgcgccccggcggtcgtcgtcgcgttgagcatcagaaacggctcctttccagacgttcgtcgcccataatgccgaccgggcggaacaagaggaccagaatcaagaacaggaaggcgaaagcgtctttatagccgcccagttcggggaagatcgccacggcgaccacctcggtaaaaccgaggataaagccgcccagcaccgcgccggtgacgctgccgatcccgcccagcacggcggcggcgaaggccttcaggccgataagcacgcccatcaggggatcgatcgtcgggtagctgatggagtagaacacgccgccgagcgccgcgagactactgccgagggcgaagaccagggagatgatccggttggcgtcaatgcccatcaggcgcacggtgttgacgtcaaaggccaccgcgcggatcgccatcccatagcgggtgcggtacagcagccagaggatcgccagcagcagcaggacggtgatcagcggcacaatccacgccacgttggtaatgatgacgctgccgaaggcccgggtctggttgaaaaagtcaggggcggagaagaagcgcgagctgccgccaaacagtacgttaaacaggttttcgagaaaaaagctgacgccgatggcagtgatcagcatggagattttcgaggcctgacgcagcggacgataggcgacccggtcaatcagcataccaaacaggccgcacagcccgagggtcaggaaaacggctaccccgaagggtagcccaaccgaagaaaataaaaacagcgtactaaacgcgccgaccatcatcacgtccgcatgggcgaagttgatcagccgcagcacgccataaaccatcgtataaccgatggcaatcagggcgtacatgcccccaagactcattccattgaccacttgctggagaaaaatggcgccgtccattttgtagcctcgtcacaacttaagggttaaccacggtacgaaacgccagcttgccatctttcacttcgttgatgaccgcgctgcgaatggcgtcgccgttctgtaacgtcagcgtgccggtcaccccctggaaatctttggtggcgcggattttttcattcacgcagacccgatcgtggggatcgctgcactggttcatggcgttgacgatgacgttataggcgtccgccgccattgcgccccaggtatgggtcggctgctggtatttggcttcccaggctttgatgaaggtttcccccgccggggtctgctctttggcgttcggcgagtagtaatcggtggtcatatagccgttgaccgcgtctttaccgacatcgaagaagacctgatccgcggccagaccgtcgccgcccaccaccggtttgttgagccccagttgtttagactgcacggcaatcagcgccccttcggtgtagtagatcggcatgtaaatcatgtcgacattcttcgccttgacgctcgccaactgggctttaaagtccttgctgccgcccggagcctggacctcgatgggaatggtgccgccgtttttcaggaactgggtgcggaacgctttcgccaggccgacggagtagtcgttgctgctgtcaaacacgatggcggcggttttggctttcagatcgcgggaggccagattggccccgaccaccccctggaagctgtccgagaagcagacccggctgacgtagggatggttgcgggtgacgcggtcgttggtggcggtggaggagaccagcggcgttttgctgtcgtcggcgattttggtcatcgccagggtgttggaggaggtgacttccccgatcacggcatccactttatcgctggagaccaggcgctgcatggcgttggccgcttcgactttgtcgcttttatcatcgataacgataagcttgatggtatcgccattttttaacgttggggtgatggcctgaataatgtccagccctttctgcgacggctggccatagccgctgagggcgccgctcaggggtaataccaccccgattttaatttccgctgcctgcgcgctgctggcgccgaccagcgcggcaaccagcgtggccattaaagacgctttcccggaaaacgatttcatgggtatttctccgtcggtcgattatttatctttaaccatcaatgactgcataacattgaggaataatgcgccagcgtatccggcgaattattggctgttatgttgaatagataacgagatatataccctaaataattcgagtcgcatgaaggcggcaagtaagcgagtccccagacgcttacagaagtaagtgactggggagagaatgcagccaacgcacatgcaacttgaagtatgacgggtatttttaatgcgctgatttaccttacaacgtccgtttcgtttttactcatgcaatattcttattacctgcagggaagggcataaggctggcgacaacacggtttttggtacggtgaaagcattttgccggggggcgactggcgccttacccggcctgaaaaatacgccatataaaccgctggcacggcttccgtagacccgtaccagcgaagcgccgccgggcaatttcagcacgcggcggaatataaagtcaggtgcacaagataatattaaaaatctattctgctgctcgcgtgacttattattttaaagggggcaacggttttattttaccatgcagcgccggattatcgctttcatctttcagacccaccccggtaagccgacgcaaaaaagcctgctccagcagccaggccagtttaaaggcggcggcgtcatggcttaatccctccggccgaatattggagatacagttgcgctcagactccagacgctgacgatgaggctgccaggtgaggtagacgccgaggctgtccggcgaggagagacccggtcgttcgccaatcaggatcgccaccgcgcgggctttcagggtttcgccaatatcatctcccagcgccacccgcgactgatgcgccagcaccaccggcgccaggccgatacccagcgtccgcagatagggcagcagggcgcggatcaacggcaccgcctggcgctctaccgcccaggaagagaggccgtcgccgatcaccagcagcaggtcggcggggcggacgccgctggcggcgaggtcggcgcgactctcatcggcgagctgccgcccgagatccgggcgccgcagataggtatgacggtccggcgcggcgctgtgcaccgtcagggcctcgaggccgagcgccgccagcggcgccaccaattgttggctggcgaacggctgatgaatggcatcccgcgctctggcatgggccagaccaaagttgaggacttcgcgggtcggcagactggcgccgctgcgccccagggcgatccgcgcatcggtaaattcacgcagcgggttccaggcatcgggacggttcatacggaggctccttgcggcaggacggacagcagtggatgacgggcgtcggtgagccgcagcgcgccatgcggatcgataatttgcattttcgccagccagtcggcgaactccggggcatgctttaagcccagcaggcgacgggcgtacagcgcgtcatggaacgaggtgctctggtaattgagcatgatatcgtccgctccgggcacaccgatcaggaaggtgagcccggcggcgcacagcaaggtcagcagggtgtccatatcatcctgatccgcttccgcgtggttggtatagcagacgtcgcagccgatcggcaggcccatcagcttgccgcagaaatgatcctccagcccggcgcgaataatctgcttgccgtcgtagagatactccggaccgataaaaccgaccacggtattgaccagcagcggttcaaagtggcgggcgacggcgtaggcccgcgcctcacaggtttgctgatcgacgccgtggtgggcgttggccgacaggcagcttccctggccggtctcaaaatacatcacattgttgccgagggtaccgcgcctgaggctcagggccgcctcgcgggcctcctgcagcatggcaagattgatgccgaagccgctgttggccgcttcggttcccgccaccgactgaaacaccagatccaccggcgcgccgcgctcaatcagctgcagcgtattggtgacatgggtcagaatgcaggactgggtgggaatggcgaagcgctggataatatcgtccagcatcacgttcagctgcgccagcaccggtaagctgtcgctggccgggttgatgccgatcaccgcgtccccggcgccgtacagcagcccgtcgagcatactggcggcgatgcctttcaggtcgtcggtaggatggttgggctgcaggcgtacgctgaggtggccgggcaggccgatggtgttgcgaaagcgcgtcaccacctggcatttgctggcggcaaggatcagatcctgattgcgcatcagcttactgaccgccgccgccatctccggggtgatggcgcgggcgacccgctgcagcgtggcggtatcggtagcatcatccagcagccagtcgcgaaaatcgccgaccgtcaggtgacgcagggcggcaaagccctgcgcatcatgggtgtcgaggatcaggcgagtcacttcgtcctgctcgtaagggataagcgggttgtcgagaatgtcggtcagcggcacctcggcgagggccattttcgccgccatccgctcttcggctgaggtggcgataatccctgcgagggcgtcgccggagcgggccggcgacgctttcgccatcagcgttttcagactatcaaagcgccatacctggcccgatagcgtggttttatacatgccgcctcctcaggagaccgtgcgcagttgaggatccactggcgcccgttcacgggccgctgcggttttgcggaaccacaggtagccgccgagcatcatcgccgcgaaaatcagcgccaacagcaggttataccagaccatcgccaccaggcagagcaccgccatgccgagggcaaaggccggcgccagcgggtagagcggggcgcggaacggacggatcagcttcggctcgctacggcgcagtttgaacagcgccgccatggaagtgatatacataacaatagccccaaataccgacatggtgacgatgcaggcggtcagcggcatgccgctgatggtgatcagcgagtcggagaagatcgcggcgatccccaccacgcccccggcgaggatcgccagatgcggggtgcgggtgcggcggttgagggaggccagcccggcgggcagatagccggcgcgggcgagggagtagatctgccgcgagtagcccataatgatgccgtggaaggaggcgacgaggccaaacagccccagccacaccagcatatgcagccagccgctgccgttgcccaccaccgtcttcatcgcctggggcagcggatcgttaatattggacagcgcgcgccagtcgccgacgccgccggcgaagaccatcacgccgatcgccagcaccgtcagcgtcagaatgccgccgcccagggcgcggggaatggtgcgctgcggatctttggcctcttcggccgccatggaggccccctcaatggcgaggaagaaccagatggcgaacggaatggcggcgaacatccccggcagcgccaggccgctgaagctgtccgcgcccgcccagccgttagtggtgaagtggctccaggagaagccgggggcgaccacgcccataaacaccagcagctcgaagatggccagcagggtgacgatcagctcgaaggtggcggcgatgccgacgccgagaatattgagcgtcataaagatcacgtaggcgccgcaggcgacccatttcggatccagcgccggaaactgcacgttgaggtaggccccgatggccatggcgatggccggcggggcgaagacgaattcaatcagggtggcaaaaccagcgataaagccgccggtgggcccgaaggcgcggtaggcgtaggcgaaagggccgccagcgtgcgggatggcggtggtcagctcggtaaagctgaaaataaaggcgcagtacatggcggcgaccgccagggcgacgaccataaaccccatcgtgcccgcctgcgaccagccgtagctccagccgaagtactccccggatatcaccagtccgacggcgatcccccataaacgaaaactgccgagcgttctttttaaggtggtggtttgctctgtcatacgtattgcctcgccagatagaaaggtgctgaacgacaggctgcaaagagagtgccagaacgttgcctgccgcgataaggcgtcagtccgtggcgcgcccgctggcgctgcgcaaaaatggggcaggctgcacgctgtcggcgcgcgccctggtgcagcggctttgctttttcaacggcggcacggtataacacttcttcttttggatgtttagatgtctatacgtttatacgcatcatgacccgggcaagcgggctggcgtgagaaaataaaatgcaaagcacaacacaacaacaaggtgggcagctgaagcgcaccatgaaaacgcgccatctgatcatgctgtcgctcggcggcgtgattggcaccggcttattcttcaataccggctatatcatctccaccaccggcgcggccgggacgctgctggcgtatctgattggcgccctggtggtctggctggtgatgcagtgccttggcgaactgtcggtggcgatgccagagaccggcgccttccacgtttacgcggcgcgctatcttggcccggcgacgggctataccgtggcgtggctctactggctaacgtggacggtggcgctggggtcgagcttcaccgcggcgggattctgcatgcagtactggttcccgcaggtgccggtctggatctggtgcgtggtgttctgcgcagtgatcttcggccttaacatcatttcgacgcgcttcttcgccgaaggcgagttctggttctcgctggtgaaagtgatcaccatcgtcgcgtttattattctcggcggcgcggccattttcggcatcattccgatgcaggatggctccccggcgccgggcctgcgcaatatcaccgccgaaggctggttcccgcacggcggcctgccgatcctgatgaccatggtggcggtgaacttcgccttctccgggacggagcttatcggcattgccgccggagagacggaaaacccgcataaggttattccggttgccatccgcaccaccatcgcccggctgattattttctttatcggcaccgtgtttgtgctggcggcgctgatcccaatgcagcaggcgggggtggagaaaagccccttcgtgctggtgtttgagaaggtgggcatcccttatgcggcggacatgttcaacttcgtgatcctgacggcgatcctgtcggcggctaactccggcctgtacgcttccgggcggatgctgtggtcgctgtcgaacgagaagacgctgccggcctgctttgccaaagtcaataaacggggcgtgccggtgaccgccctgtcggtgagtatgctgggcggcgtgctggcgctgttctccagcgtggtggcgcccgatacggtgtttgtcgcgctgtcggcgatctccggttttgcggtggtggcggtgtggttgagcatctgcgcctcgcactttatgttccgccgccgccatctgcagcagggtaaggcgctgagcgatctgcagtatcgcgctccctggtatccggtagtgcccgttctgggctttgtgctgtgcctggtggcctgcgtgggcctcgcttttgacccgagccagagaattgcgctgtggtgcgggatcccctttgtggccctgtgctatggtgcctggtatcttactcgttcacggaatatgactcaggagccccaacatgtcgcagactaatccgtttaccgccctgcttgccgcccagcctttcgtgctgctggacggcgccatggccaccgagctggaggcccgcggctgcgatctggccgacagcctgtggtcggcgaaagtgctgctggagaacccgcagctgatccgcgatgtgcatctcgactactttcgcgccggggcgcaggtggcgatcaccgccagctatcaggccactccggcgggctttgccgcgcgcgggctggatgaggcgcagtcccgggcgctaatcggcaaaagcgtcgagctggcgcgcaaagcgcgcgaggcgtacctcgccgagaacccgcaggccggtacgctgctggtggccggttcggtggggccgtatggcgcgtttctcgccgacggctcggagtatcgcggcgattatcagcgcagcgcggcagagttccaggccttccaccgcccgcgcgtcgaagcgctgctggatgccggcgccgacctgctggcctgtgaaaccctgccgtcattcgctgagatccaggccctggcggccctgctgcaggagtatccccgcgcccgcgcctggtactccttcacgctgcgcgacgccgaacatctcagcgacggcacgccgctgcgcgaggtgatggccgccctggcggataacccgcaggtggtggcggtggggatcaactgtatcgccctggaaaatacgcccgcggcgctggcgcatttgcacagcctgacggccctgccgctggtggtctatcctaactccggcgaacattatgatgcggtgagcaagacctggcaccgtcatggcgaagcctgcgccagcctggcggattatctgccgcagtggctggccgccggggcgaagctgatcggcggctgctgccgcaccacgccgaaggacatcgccgcgcttaacgcgaagcgctaaatttttgccgggtggcgctgcgcttacccggcctacatattgcgcgaaccggatgctgggtaaggcgtagccgccgcccggcgccaaccatctgccactaactcaccgcacaaaaccaactatcctttcccgcttttgttctaaaaacgattcgctattagccagaatttttaattacttcatctccatcctgatgccggaaatactgcacctataacaactcaggggaagcagacattatggcattcacatcgcgaattactcttctggcggcgctggctgtcgccgccttccaggcgcaggcggtcaacgttaccgtggcgtatcaaacctccgctgagccggcgaaagtcgcccaggcggacaacaccttcgccaaaaccagcggggcgaccgtcgactggcggaaatttgacagcggcgccagcgtggtacgcgccctggcctccggcgatgtgcagatcggtaatatcggctccagcccgctggcggtggccgccagccagcaggtgccgattgaagtgttcctgcttgcctcaaagctcggcaactccgaagcgctggtggtgaagaaaagcattaccaaaccggaagatctgatcggcaagcgcattgccgtgccgtttatctccaccacccactacagcctgctgtcggcgctcaaacactggggcatcaagccgggccaggtacagattattaacctgcagccgccggcgattatcgccgcctggcagcgcggggatatcgatggcgcttacgtctgggcgccagcggttaacgaactggaaaaggagggcaaggtgctgaccgattcttctcaggttggggagtggggcgcgccgacccttgacgtctgggtggtccgtaaggacttcgccgagcagcatccggagatcgtcaaagcgtttgctaaaagcgccatcgacgcccagcagccctacatcgccaacccggaggcatggctgaaacagccggacaacatcagcaagctggcgcgcctgagcggcgtgccggaagccgatgtccccgggctggtgaagggcaatacctatctcaccgccgctgagcaggcgcaggcgctgaacgggccggtcaatcaggccatcgtcgataccgcgcgcttcctgaaagagcagggcaaagtgcctgcggcgggaaccgattatcgtcagtacgttactgaccgctttgtgaagtaaaggaggcggcgatgctgcaaatctcgcatctttccgctgactacggcggtaaaccggcgctggcggatatcaacctgacgctggagagtggggagctgttggtggtgctggggccttcgggctgcggtaaaactaccctgctgaacctgattgccggattcgtgccctatcagcacggcagcatcaccctcgaaggtcagcgggtgaccgggccgggcgcagagcgcggggtggtcttccagaacgaaggcttgctgccgtggcgcaatgtgcaggataacgtggcgctgggcctccagctggcgggcgtggataaagcgcagcgccggcaagcggcggcgcagatgctgaagaaggtggggctcgaaggggcggaaaagcgctttatctggcaactgtccggcggtcaacgccagcgggtgggcatcgcccgggcgctggcggcgaatccgcagctgttgctgctggacgagcccttcggcgcgcttgacgcctttacccgcgagcagatgcagacgctgctgctgaaactgtggcatgagaccggcaaacaggtgctgctgatcacccatgatattgaagaggccatcttcatggcgaccgagctggtgctgctgtcgccggggccgggacgggtggtggagaggctgccgcttgatttcagccgtcgctttgtcgcgggcgaatcctgccgcagcattaaatccgacccgcgctttattgaacagcgggaatacattctgagccgggtgtttgaccaacgggaggctttctcatgagcgtggtactgaacgacaaaccgcgtcagtcgacgctgaagtggcgctggccgctctcccgccagctcaccctcagcgtggcgaccctggcggtattgctggccgtctggtgggcggtcgcggcgctgcagctgattagcccgctgtttctgccgccgccgggccaggtgctgcagaagcttatcaccatcgccgggccgcagggctttatggatgcgacgctctggcagcacctggcggcgagcctgacgcggatcgttatcgccctgctggcggcagtgcttattggcgtaccggtggggatcgccatggggctcaactcgacggtgcgcgggatcctcgacccgctgatcgaactctatcgtccggtgccgccgctggcctacctaccgctgatggtgatctggtttggcatcggtgaaacctcgaagatcctgctgatctacctggcgattttcgcgccggtagccatgtcggcgctggcaggggtaaaaagcgcgcagcaggtgcggattcgcgctgcccgttcgcttggcgccagccgggcgcaggtgctgtggctggtgatcctgcccggcgcgctgccggagatcctcaccgggctgcgcattggtctcggggtgggctggtcaacgctggtggccgctgagctgatcgccgccacccgcggattaggatttatggtgcagtctgccggcgagtttctcgccaccgatgtggtgctggcggggatcgcggtgattgccattatcgcctttttactggaactgggtctgcgcgcgctgcagcggcgcctgacgccctggcatggagaagtacaatgagtgaacgtctgagcattaccccgctggggccctatattggcgcgcaggtgagcggggcagatttaacccgtccgctgagcgacaaccagtttgaacagctgtatcacgcggtgctgcgtcatcaggtggtattcctgcgcgagcagaatatcaccccggcgcaacagcgcgatctggcgctgcgttttggcgacctgcatattcatccggtctaccctcacgccccaggggtggaggagattatcgtcctcgatacccacaacgataatccgccggataatgacaactggcataccgatgtcacctttatcgacacgccgcccgccggcgccattctggcggcgaaagagctgccgacgaccggcggggacaccctgtggaccagcggcatcgccgcctgggaagcgctgtcagaacccttccggcagctgctgagcggcctgcatgccgaacacgatttccgcaaatcgttccaggagtataagtacaacaagaccgaagccgagcatcggcgctggcaggaagcggtggcgaagcatccgccgctgctgcatccggtggtacgtacccacccggtgaccggcaagcaggcgctgttcgttaatgaagggtttaccacgcgaattgtcgaggtgagtgagaaagagagcgcagcgctgctgaacttcctgtttgctcatgtcactaaaccggagtttcaggtgcgctggcgctggcagccgaacgatgtcgctatctgggataaccgggtgacccagcattacgccaacgccgactatctgccgcagcggcggatcatgcaccgggcgacgatcctcggcgataagccgtattaccgggcggggtaaggcttgtagccggttaaggcatcagccgcgagccgcggagaaaagcggatgctgcattgcccgctgcttcccggaggcgtcgcctgacgcgccttttccgggctaccgatccgtcggaaacggtagcccggctaaggcgcaacgcgccgcaagccgggaaaaagcgtttatgccgatttttgcgcacccagatgcgcgccaatatagcgctggtagcgattggccttcaggtaggtgagatccaccagcaccagaccatccacgcagttgttgaaatccgggtcgctgccgaaatcgataaactgcacgccgcccggctcgcacacttccgagtactgcttatacagcggggggatcgcgcagccgaggttgccgagcagggacttcagccgggccaggtcgtcgttgtaatcctccccgccaaactgcgccagcacgtcgggcagcgacgccggataaggtcgacgcgactccgccagcggatgcgtcgccgggaaccacatccggtagaatgccaccagcagatcgcgggcggcgggcggcaatccgccagaaatcgacaccggaccaaacagatagcgatagtgcggatagcgcgccagataagcgccgatgccggaccacaggtagtccagcccgcgacgcccccagtagcgcggctggataaagctgcgccccagctcaatgccgtgctgcaggacatcgtccatccgcccgtcgtaatggaacagactgtaactgtagatcccctccaggccgcgctttgccaactggatagccgtcggcataaagcggtaagcgccgacgatctcgaggtcttcttcatcccacaggatcagatgcagatagtcgtcgtcatacccgtcgatatcccgccgtttgccgctgccttccccgaccgcgcggaaggcgatttcccgcaggcgtcccagctcgcgcagcagcggcgcgtcctcctggccgttgcgctgccagaggtaaatcactttgccatcggcggtgcggcccaggcattcggccttgtgcagttcgcgtttgagcagcgcccggtcttccggacgggcgatagcgctttcggttttaaaccgccccggcagccctttgcgcagctgttcaaggtgctgatagcagctgccggtaagctcgcgagcgctggactgcacatcgaaccagttcgaccaggggatctgctggccgatacgcaccggcaggctgctgttgcgccggcgaaacatctgctgcatcagcaggagcagcggcaggttgtctgatatcagcgtgctggcgtaaaacagggcgctgttgcgggcgttaatccacgccggcagcagcggggcgcgatattttgccgccagcttaataaagccggagtgccattttttatcgcggatgccgcgaggggtgaggcgggagacttcccccgccgggaagaagatcagcaccccgccggcctgcagctgctggtccatctgctgcagcgccgctttagcggtgcggccatgaatattatctaccgggataaacagcgagctcaggggctcaaggtgggtgagcatgcggttggtgaccactttgacatcgcggcgcacgcgggataccgcatacaggagcgccaggccgtcgagggtgccggtggggtggttggcgataatgaccagcgggccatattcggggatttgttcgagatcgtgcgccgggatggcgcagcggatattgaggtattccagcacctgttcgaccgtatcaagccccttcaggtggcggtgacggtcggcaaattgttgaaactcttcctcataaaatagcttttttaacagtttcttttgccagggggcgggcctcgcctgaggccacaggtcatcgagtacgttgtcgagactaaacatagtggctcctcctccgtcctgcccagacagtagaaggtggagatgtcgttcagattacagttgggtgaagtttcggtcgcagcgggggagacgacgcatagggagccgtttttgcgccgggtggcggctgcgcctgacccggcctacatgcggatggggctgcgggcccggcaagttcgtaggcccgcgcaagcgtcagcgccgccgggcaatgacaacgggtagggagacgtttttgtgccgggtggcggctgcgcctgacccggcctacatgcgggatgggactgcgggcccggcaatctcgtaggcccgcgcaagcgtcagcgctgccgggcaatggcaacgggtagggagacgtttttgcgccgggtggcggctgcgcctgacccggcctacatgcgggataggcctgcgggccccggtaagcgcagcgccaccggggaggggcgggtttaacggaggatctttttctcggccagatcgagggcgaaatagctgaagatcaggtcggcgcctgcgcgtttgatagcgccgaggctttccagaaccactttctcttcatcgatagcgcccgcctgggcagcgaatttgatcatcgcgtactccccgctgacctgataggcgccgagcggcagatcgctgcgttcgcggatatcgcgcagaatatccaggtaggcgccagccggtttcaccatcaggcagtcggcgccctgggcttcatcgagcagcgactcgcgaatggcctcccggcggttcatcgggctcatctgataggttttccgatcgcccttcagcgcggtaccggccgcttcgcggaacggaccgtagaaggaagaagcgaacttcgtcgagtaggacatgatcgccgtattggtgaagccggcggcgtccagcgagcggcgaatcgcctgcacctgaccgtccatcgcggcggaaggagcgatgaaatccgcccccgcggcggctgcgacaacggcctgtttgccgaggttttccagggtcgcgtcgttatccaccccgtggtcgcacagcacgccgcagtggccgtgggaggtatattcgcagaagcaggtatcggacatgacgatcatctccggcaccgtggacttacaaatccgcgacatacgcgccaccagaccattttcattccaggtatcgctgccggtggcatcggtgtgatgagaaataccaaaggtcatcaccgagcggatcccggcgttggcgatgcgttcgatctcgcgcgccagatatttttccggaatgcgcatcacgccgggcatggcctcgatcgctttgtaatcatcaatttcttcttcaacaaagatcggcaacaccaggtcgttcaaactcagtgttgtctcttcaaacagggcgcgcagcgcagcggattgacgcaggcggcgggggcgagtgattaaatctgtcatggtttgcctgattttgtgaaatgaaagacgatagtgtaactgaaatggcagcgggatgtttcgccaaaacgatcgttatggcgcatcggcgaaaccttccccgggcttactggctggccgtctgcatgttgggctgtgcgccgctcagctcgctgaccaggtcgttgatgccatcgctcatattgttgaagcgggttaacggcgagcgggttaccaccacaaaggcgccaacgttagcctgcggattcatcgccatataggtgataaacccaccgccgccgccggttttctgaataatccccggatggccgttcttcggcttcatatacacccagccgaggcccagcgcgtctgcgcggcccggcacgtccataccaatcacccgggtcagctggttacgctgataaatcagcgtctgcatccggtcggcctgctggctgcgggtatagaaatcggatgacaggaactgctgcatccagcgcatcatatcccccggcgtcgagtagactccgccgctgccgatcgccgccagggtgttgttgcatgggctggcgcctttttccgggatcatcagccgctggcactgatccggtgacggggtaaaggtggtgtccttcatccccagcggccgggtgatctgctcttcaaacagctgcggatacggtttgccggcagcggtggcgagcgcgtccgccagtaaatcgaaggccagattggagtaggccgcctgcgagcccggcgcggctttcagggtcgcggtagagagccagttccagcgctgctggcgggtcggccagacaaacaccggacgatgagcggcgccgccaggctgctcgcgcggcagggcgctggtatgggtcgcgaggttaaccagggtgattggttttccctgccagtcaggcacccgggcgcccggcggggcgtatttgctcagcggatcgttgagtttcaccaccccctggtcgagcagcttcaccagcatctcgctggtcatcagtttgctgagggaggcgatacggatcaccgagtcgagctgcgggtgctgattattccccgggcgggtttcgccaaagctgcgaaaaacacgctgattgccatcgataaccaccagcgccatgccggtggcgccgctgccgtagtagatatgattggcgtaacgatcgaccacatccgaggcgaaaaccgggtcaacggtaggctgtgcggcctgcaccgaggtccacgacgccgcgcacagcgcagcaaaaatgagcaaactacgtttcaacggagatcatccattaaataaataaaaagaagagggtatttatactacgaagtggcgcagaacaaagcgggattcacgacattcctgcaggaaaaaggtaacggtgcgtaaaaaagacttttttacgctttcggataccggcttttttcgccggcgcgtatgatgaccgtttggctgaaggttcgtgggagagaacaatgacggctcaacgggtagtgatggtcgtggatatgcaaaacggcgtgttcgccacgccgcgtctggcgcgcgagcgctgcgtcgcgcaaattaatcgtctggtgcgcgcggcggacaaggttattttcattcagcatgatgaagccggcggcctcgaagccggcagcgaaggcttcgccctgcttcctgagctggagcagccggctggcgcgctgtatgtcaccaaaaccgcctgcgatgccttctatcacacctcgctggcgcaggtgctggacgaacacgacattcagcagttcgtcatctgcggctgcgccaccgactactgcctcgataccaccattaaaaatggcgccagccgcgggtacggtattgttatcgcggaagatgcccacaccaccgccgaccgccccgccgcgcaggccgcgacgcttatcgcccactacaatgaggtgtggcgtacgctgaccattcctggcaatcctttacaggtgaaacccacagaaacaattctgcacgcatggcagcagaactaagctgttgatatccggtcttatcattcgtctgtcccgcgagggctcatccacgcggcggccgacgtatgcgtcgtacacagcaatagcagaacgataagaagttagcaggagacaatgatgtttaaatcttttttccccaaaccggggccgttttttatttctgcctttatctggtcgctgctggccgtgatcttttggcaggcgggcggcggcgactggctgctgcgggtcaccggggcatcgcaaaatgtggcgatcagcgcggcgcgcttctggtcgctcaactatctggtgttctacgcttactatctgttttgcgtcggcgtgttcgcgctgttctggtttgtctactgcccgcaccgctggcagtactggtcgattctcggcacctcgctcatcatcttcgtcacctggtttctggtggaagtcggggtggcgatcaacgcctggtatgcgccgttctacgacctgatccagagcgcgctggccaccccgcataaggtcagcatcaaccagttttatcaggaaatcggcgtctttctcggcatcgcgatcatcgcggtgattattggcgtgatgaacaacttcttcgtcagccactacgtcttccgctggcgcacggcgatgaacgagcactatatggcccactggcagcatctgcgccatatcgaaggcgccgcgcagcgtgtgcaggaagataccatgcgttttgcttccaccctcgaagatatgggcgtgagctttatcaacgcggtgatgaccctgatcgccttcctgccggtgctggtgacgctctccgaacatgttcccgacctgcctatcgtcggccatctgccgtatggcctggtgattgccgctatcgtctggtcgctgatgggtaccggcctgctggcggtggtggggattaagctgccgggcctggagtttaaaaaccagcgcgtggaagcggcctatcgtaaagagctggtttacggcgaggacgatgaaactcgcgccacgccgccgacggtgcgcgagctattccgcgcggtgcgtcgcaactatttccgtctctatttccactatatgtatttcaatatcgcccgcatcctctatctgcaggtggataacgttttcggccttttcctgctgtttccgtcgatcgttgccggtacgattaccctcgggctgatgacgcaaattaccaacgtcttcggccaggtgcgcggctcgttccagtacctgatcagctcgtggacaacgctggtggaactgatgtccatctacaaacgtctgcgcagttttgaacgcgagctggacggcaaaccgctgcaggaagcgatcccgacattacgttaatcaagacaaggaagcataatggccgcacgtttatcgcgcattattcccgtttcattgacgctgctggcggccatggcgctgagcgcctgtaccagccagcaggctccggcgctgaaagagggcgagaagcctgttgacgtggcgtcggtggtgcggcagaaaatgccggccagcgtcaaggatcgggaggcctgggcgcaagccatcgccaccgcgtttgacagccagaagctggcgccgacggaagaaaacgtctgctcggtgctggcggtcgcgcagcaagagtctaactatcagtccgatccggtggtgccggggctgaataaaatcgcctggcaggaaattgaccgccgggcggaaaaaatgcacattccgccgtttctggtccataccgcgctgaagatcacctcgccaaacggtaaaagctatagcgaccgtctggacaatgtgaagacggaaaagcagttgagcgccatttttgatgactttatcgggatggtgccgatggggcagaagctgttcggttcccttaacccggtgcacaccggggggccgatgcaggtcagcattgcttttgccgagcagcacaccttcggctacccgtggaaaatgaacggcacggtgcgccaggagatcttcagtctgcgcggtggcctgtggtttggcacctatcatctgctgaactatccggccagttatagtgcgccattgtaccgctttgccgacttcaacgccggctggtacgccagccgtaacgccgccttccagaacgcggtggtgaaagccagcggggtaaaactggcgctcgacggcgaccttatccgctacgacagcgaggagccgggcagcaccgagctggcggtgcgtcgcctggcgagccagctggggatgagcgacagcgagatccatcgtcagttgaaaaagggcgacagcctggcgtttgagaagaccgatctttatcagcaggttttccgtctcgccgagaaaaaggcgggcaaaaccctgccgcgggagatgttaccagggatccagctggagagtccaaaaatcacccgaaatctgacgacggcgtggtttgcgaaacgggttgatgagcggcgggcaaactgtatggcgcggcgttaacggcgctgacgccagcgcacgataagcgccagtaccccgatgaacgtgcagccgatcaggaaagggatcagaccaaagagggtacccacggcgaggctgatgtcgacttgcggacggctggcgtcctgggcttgcatcaggcgttcaaatacccccggggcgtggatcagcatgctgagcatctgcgcgccggcccagcagcaaatcaacacgaacagcccgtaggcgacatggctgccggtcagcgcgcccctttttttatttcccaaaagcgattttgaaaaactgaattcagccataggccctcccacatctgcgctgctggttttttctccagctctatgtcaggtattctggcagtcaggggccatcatcagtatcagattgctggtaattgccgtccaggaataatcctgttttcgccgttgtgttaaccgcgccacaggagcacaaaagggagagcggcgtcgcaatccagcaacattctccatatcgctacagaccgccgcgggctgctatgcgaagatgcgttttttgctgttggaggccgcatgaagctcactgataaaattcgccgcgattggcactactacgccgtggcgctggggttgatttttattcttaatggagtggtggggctgatggggtttgaaactcaggggtggcaatcctacgccgtcggtctgatcacctgggtcattagcttctggattgcgggctttgtgatccgccgccgcccggcagaagaggcctgaggccgccgctgccaggcggggtaaaacgcgttttagttcatggaggttttcagcgcccggtccgcggcatggcgctccagcgccagctcaatcaggcgggtgatcaggctggtgtagtcgagaccgctggcctgccacagcttcggatacatgctgatgttggtaaagcccggcagggtgttgatctcgttgatcaccacctcgttgtcggcggtgaggaacacgtcgacacgagccatgccgctgcagcccagggtctggtaggcctgcaccgcgatagcacgaattttgtcgttgatctcaggggcgatagcggccgggactaccacctgcgcgccctgatcgtcgatatacttggtgtcgtaggcgtaaaactcgctgttgaggacgatttcaccgcaggtgctggcctgcgggtggtcgttacccagcaccgcacactcaatttcccgccctttaatgccttgctccaccaccactttatggtcaaattcgaaggccagggccaccgcctgatggtactgctcttcgtttttaactttgctgacgccaaccgacgatccctgattagccggcttaacgaacagcggcaggcccagcttcgcttcgacatcggcaaagctgaactgcgcgcggttggcgcgggtgagtgtgataaacggggcgacggcgagcccggcgtcgcgcagcagacgtttggtcacgtctttgtccatacaggccgcagagcccagcacatcggagccgacgaacggcagattcgccatgcgcagcatcccctgcagggagccatcttcacccagcgtgccgtggacgatcgggaaaatcacatcgatggccgccagcggttggccgctttcggcgttaatcagctgctgcgcttcgcggcccgggatctgcgccagagtcaccgtggaagggcgcagggcaatgcgggcaggatcctgtgcgttgagcaggtagttgccggcgtcgttgatatgccacagcccctgtttatcaatacccaacagaaccacatcgaagcgcgatttatcaatcgcttccacgatattcttcgctgactgcagcgacacttcatgctccgccgacttgccgccaaaaacgatcccaaccctcatctttgccatttcaacttccatccagataacatcaaagggcataacataccatgtgaaaccgctgcctggctgccataatatttacctgatcaattgacgggagtgggcgtgagaggaaagacgctgctggtgctggccgggctgctcggcgcgggcctgttgggataccgcaatctgccgccgcacctgaatccgctggcgccgctggcgctggacgatcccccgggctggctgacgtcgtttaagctgcgcaggctgacggcagaccagtgcgcctccctgctggcggaagccaatcgccggcggcttatcgccagccggccggtggccgacagcgagggaagctgccctctgcgtaacgtggtgcgggtggcgaattttggctcggtgcagctgagcagtagttttctcgccagttgcccgctggcgctgagcagtgcgctgtacatcgagcagcaggcgaagccgctgacccggcagctgatggcgagcgatctgcgtcagatcgatcatctcggcagctttgcctgccgcaatatttaccatcgtcaacaggcgcggcgcagtgaacacgccacggcggacgcgctggacgtcagcggtttccgtctggcggacggtagacgcgttagcgtcctgcagggctggcggagcgagacttcgcgcccctggctggcggcgctgttgagcagcagttgccattacttcggtaacgcgctggggccagagtacaacgcggctcacgccaaccattttcatttcggcatgcgcgggcagggcttctgcttttgagcataaagcgctatgagcagcctaaatgaccagaaaatgcttcgtcaggctctcatccgcagccataaaacaccaaactcaccgccagcgcatctatggtagtacaccagtgggatgaaattgctaagctagataataattggcaaatcattaatgaatacgcgtagttatggaatcctggaaggttaatctcatctccgtctggtttggttgcttttttaccggcctggcgatcagtcaaattctcccctttttacccctctacgtctcccagctcggcgtcacctcgcatgaagcgctatcgatgtggtcggggctgaccttcagcgtcacttttcttgtctcggcgatcgtctcgccaatgtggggaagcctggcggaccgtaaaggccgcaagctcatgctgctgcgcgcctcgttggggatggcgattgccattttactgcaggccttcgccaccaacgtctggcagctgtttatcctgcgggcgatcatgggcttaacctccggttatattcccaacgccatggcgctggtggcctcccaggtgccgcgcgagcgcagcggctgggcgctaagcacgctgtcgacggcgcaaattagcggggtgatcggcggtccgctgctgggcggtttcctggcggaccacgtcgggctgcggatggtcttttttattacggcgatcctgctgaccatcagttttctggtgaccctgtttctgattaaagagggcgttcgcccgcaggtcagcaaaagcgagcgtctcaccgggaaacaagtctttgcctctttgccctatccggggctggtgatcagcctgttcttcaccaccctggtgatccaattgtgcaacggctcaatcggcccgattctggcgctgtttattaagtcgatggcgccggacagcaacaatatcgcttttctggccgggatgatcgccgcggtgcccggcgtgtcggcactgatttctgcgccacggttgggtaagcttggcgaccgtatcggcacctcgcggatcctgctggcgacgctctgctgcgcggtggtgatgttcttcgccatgtcctttgtcaccaccccgctgcaattgggtacgctgcgttttctgctcggctttgccgatggcgcgatgctcccggcggtgcagaccttattgctgaagtacagcagcgacagcgtcaccgggcgtatctttggctataaccagtcgtttatgtatttgggcaacgtcgccgggccgctaattggcgcctctgtgtcagccatggccggcttccgctgggtgtttattgccaccgccattatcgttttcattaacctctggcagctggcgtggatgctgcgccaaacccgtcgggctaacgcctgaacctctgctgacggtatttattgcgataccgtcagcattattcgccgtcagcggatttactattactttttgttatcgttatggcgtgaacgctattccattttattattttccaggcaatctggttataagcaactccggtcatgattaaacaatactatttatagtggtattttattgtggtaaaacgtttcgctgtatattgggtgttgcgatgattcttaatttaagtaattctgaggtccgtcatcgcgtatgacatcccaatcaaaacaggcctcgcataaggaactggtgctatgaagaatctcattgctgagttactggttaaactggcgcaaaaggaagaagaagcaaaggaactgacggtgcaggttgaagcgctggagatcgtggtcaccgcattattgcgccatatggagcatgatgcccagcaggcattgattcaggatattgaacaggcgattgaccaggtgacgccctgtccgccggtcaacgaccatgatgcgatgctgctgcagcaatatctaaagaagctgttgcggcatcctcgtagctagtctttgtgacacgacaaggatgccgtcatttttctgtcatctcccttttataaagtctccctcgttttgtttttttaagtattttttacatggagatgacaaaagtgaaattaagcgccctgtttattgccctgattcctctactgggctcgccggttattcatgcagaaactactgctgcgccggttctggaaaatcgcgctgcgcagggagatatcaccactcctggcggcgcgcgtcgtttaacaggcgatcaaaccgaagcgctgcgcgcctcgctaatcaataagccagctaaaaacgttattctgctgattggcgatggcatgggtgattcggaaattaccgctgcgcgaaactatgccgagggggcgggcggtttctttaaaggaattgatgctctgccgttaaccgggcagtacacgcattattcgctggataaaaaaaccgggaaaccggactacgtgaccgactcggcggcctccgccaccgcctggaccaccggcgtgaagacttataacggcgcgctgggcgtcgatattcatgagaatgcgcatcagaccatccttgagctggcgaaagcggcggggctggccaccggcaacgtttccaccgccgagctgcaggacgccacccccgcggcgttggtggcgcatgtgacatcgcgtaaatgctatggcccgacggtcaccagcgaaaaatgccccagcaatgcgctggaaaaagggggcaaaggctccattaccgaacagctgctgaacgcccgaccggatgtcaccctgggcggcggcgcgaagacctttgccgaaacggcgacggcgggcgagtggcagggcaaaaccctgcgcgagcaggcgcaagcgcgcggctaccagattgtgaccgacgcggcttctcttgccgccgcgacggaagccagtcaggataaaccgctgctgggactctttgccgatggcaatatgccggtacgctgggaagggccgaaggcgtcttatcacggtaatatcgataagccgccggtgacctgtacgccaaacccgaagcgtgacgcctcggtgccgacgctggcgcagatgaccgagaaagcgattgacctgctgagtcgcaacgagaaaggtttcttcctgcaagtcgaaggcgcgtccatcgataagcaggaccatgcggccaatccgtgcggccagatcggcgaaacggttgatcttgacgaagcggtgcagaaggcgctggaattcgcgcgaaaagacggtaataccctggtgatcgtcaccgccgaccatgcgcatgccagccagatcatcccggcggatagcaaagccccggggctgacccaggctctgaacacgcacgatggcgcggtgatggtgatgagttacggcaactctgaggaagagtcgatggagcacaccggcacccaactgcgcattgcggcctacggtccgcatgcggctaacgtcgtcggcctgaccgatcagaccgacctgttcacgaccatgaaagctgccctgagtctcaaataagtcgctgccggtggcgaaattgcgtcaccggctggttttttttctatctgcgtccagacttacaacgttccactcacagaaggatggtgcgatgaaaataactttattgatgaccctactgtttggcttgatctttatcagcgcggttggcgcggcagaaaaaacgcccactcctcagcagcaaaggatgacggactgcaatcagcaagcgtcagccaaaatgctgaaaggtgaggagcgcaaaacctttatgagccagtgtctgaaaaaagagaccacgacctcgcagggaaaggcgctcacccctcagcagcagaaaatgagcgactgcagcaaagcggccacggcgaaatcactgaagggcgatgaacgcagtaccttcatgagtagctgcctgaagaaagcctgaaaaaaagggagcgctcgcgctcccttgttctttaacctctcagggcttgaagcccgccggctcagcttcaggagcggctcagtttctctgatttttccatacactgggtgatggcttcgattaccgccgagcggaaccctttctcttccagcacgcgcacggcttcgatggtggtcccgccaggggaacagaccatatctttcagcgcccctgggtgttctccgctctccagcaccattttggcggagcccatcaccgcctgggcggcgaatttataggcctgagcgcgcggcattccgccgaggacggcggcatcggccatcgcttcgataaacataaagacataggccggcgccgaaccgcttacccccaccaccggatggatcatcggctcggcaatttgctccgcctggccaaagcaacggaaaatagtcagcacttcggcaacatcttcgctgctcaccagggcgttaggcgtgacggaggtcataccggcgttaaccagcgacggcgtattcggcatcgcgcgaatgattttgcgatcgtggccaagggcgcgcgccagctgctcaagcgtaacgccggcggcgatagagaccaccagcgactctttattcaggctggaggcgatatcgcccagcactttggtcatgatccccggtttaaccgcgccgaagacgatatcggcaatctgcgccacttcctgggcgctgtcggcggcgttgatgccatactggtcgcgcagagctgcaaccttgtccggcgacggggtgtagacccagatttgtcccggctgtacctgaccgctggcgatcagcccgcccagaatggccttacccatattgccgcagccgataaagccaattttcttatccatcaccattcccctctgcttttttcgttacgatctgattagcttaccatcctggcgctttcctgggggagaaaagcaggtaacattggcgtcacttattgcaggtaacaggagctggcatggccatttgggtggatgcggacgcgtgtccgaacgtgattaaagagattttgttccgcgcggcagagcggacccagactccgctgacgctggtggcgaaccagccgctgcgcgtgccgccgtcgcgtttcatccgcaccctgcgggttgagcagggttttgacgtggcggataatgaaatcgttcgccagtgcgcggcgggagatttagtgatcaccgccgacatcccgctggcggcggaggtgctggcgaagggcggagcggcgctgaatccgcgcggggaacgttacagcgaggcgacgatccgcgagcggctgacaatgcgggattttatggagacattacgggccagcggcgttcagaccggcggcccggatagtttatcgcagcgcgatcggcaacagtttgccgccgagctggagaagtggttgctggcggttaagcgtcgccagggttaaacccagctatcgtcatcgctgccaaaatcatcgtcgccaaagccggcgtcgaagtcgtcgttccaggtattgtcggcaaggaactgatcgtctccctggcggaacggatcgtcacctgcggtggtgtcctgcgcgatgctgtcctgcgcggaggcggcatcaggctgcggcttctcttcgatgatattgacgatctcctgcgggtgcgagccgctgaacatattggtcagcatattgcccagcaccacgccgcctgccacgccagcggccgtttgcagcgcgcccgccataaagccgccgccgcgtgcggcagcctgcggggcatagttctgctgcggtggtggcgtatactgcggctgagcgctggcctgcgggcgaccatattgctccgcgcccgggatagggtcagaaccgcgtgacgagccgccaccgccaaacaggccggagaggaagccgccgctgctgggctttgccgcctgcagttggctgacctgactctccagcgcctggatgcgatcgttaagctgtttaatcgcggcttcctggataagaatggtttgcgccatatagtagggggccgccggctgcgcgctcacgtgttgggcaatccgctcctcggcgctggcatcgcgcgatgcgctgtgcgcctcagcctctttcagccgggaaaacagtccatcaataaggcgttgttcttcagattgcatgttacattcctctgtcacactgtcgaataggcatcagggtgcttctgaaacatgatgttgtaaatatgttgcttcgtaaagctatgcataaatgtgttaccgtttacgccagcggtggataaaaaataacgccaagcggaaagtaaagctggttaaacactaaatgcaatgataagtttacattaatagcccctcttctcaccgtggtaatggggtgtaaagaagttgtgtaattttttctttacgtatgcattgcgggacagacagcgataatacgtgctttcgttttcatttttttgcgacagacggaaccagggggtcttcggttatgacacagcctatctttcttattgggccacgcggctgcggtaaaaccaccgtcggccatgcgctggcgcgagcgcggcattttcagttctccgataccgatcatcggctacaggcccatgagcagcggacggtggctgagatcgtgcaggcggaagggtgggcgcgttttcgcgaactggagaccctgtcgctgaaggccgtgaccctgccgaatacggtaatcgccaccggcggcggtattgtgctggcggaaggtaaccgtcagtttatgcgggagaatggcgtggtgatttatctgcaggcctcggtgtcggcgctgattgaccgtctggaagcctacccgaaagccgaacagcggccgacgctgaccggaaaaccggtgcgcgaggaagtgggcgaggtgctggcgcagcgcgaagcgttataccgggacgctgcccaccatattgtggatgccacggcctcgccggatcgggtggtggagcagattatgtccatgctgtgcagcgcgacggcaaccccggtaagttaagaatttacttacattaaggcggcgaggggcgcctatacttaatagttctgctaccagaagaaggaagaactatgccaaacaggcccccatatccgagagaagcgcgcgtggttgcggtagagaaaggtcctcagggtcagacggtgacctggtatcagctccgtgcggattatcctgagcctgattcgcttatcagcgaacatcctaccgagcaggaagccgtggatgccaaacggcgttatgaagatcctgacaagtcgtaaccccctgagcccgaattgcccgccatgctggcaatatcgggcgtatctcacattttttatttatcagtcgtactaatgaatatctaacacacggatttttcaggcacggcgccgccgcccggcaatctttacattcaaccgcggcgtggagctgctacgcttctcgacggttgatttttactcaccaggggggcggatgctgtgtgtggaaagcctgtgttgaagcagtggttgtgaaaaggtacatgatatgagtagtgcaacgatggcaattttgaccatcggcgttgtgccgctggcgggagtattgccgctcctgaccgaacatatcagggaagaacagatcgcccacatcagcctgctgggcgagatgacgcctgacgaggtaatggccgagtacgccgtaggtgacggcgagaaaggactcctgaccttgctcagtaataaccagttggtgatggtgtcgcgacagaaaattgaacgcgatgtccgcagcgcgatcgcgatgctggatcgacaacattatgatgtgatcctgctgctcagttccgaacagctgaccggttttaccacccaccacgcgatcctcctcgagccgcagcggatcatcccgccgctggtggcatcgatcgtcgatgggcaccaggtaggggtgatcgtgccggtggaagagatcatgcccatgcagcggcaaaagtggctctcgctggaaaagtcgccatactacgcgctggccaatccgtttaccggcagcgacagcgagctattaaccgccggcaaaacgctgctggagcagggcgccgacgtgctggtcctcgactgtctcggttactatcagcatcatcgcgatgtgttacaaaaagccctcgatgttccggttttgctgtcgaatgtgctggtttcccgactggcggcagaactattggtctaatgtgttaatttcacgtgacaggggcaaggagcgccccctatattgagcctttaaccgacgatcagaagggcttgtttatgcttcaaagcaatgaatactttgacggaaaagtgaaatccattggcttcaccagcagcagtaccggtcgcgccagcgttggcgtgatggcggaaggggaatacacctttggtacggcgcagccggaagagatgacggtagtcagcggggcgctgaatgtcctgctgccgggtgagactgagtggaaagtttacgctgccggcgaagttttcaatgtgccaggcaacagcgaatttcatctgcaggtggctgagccaacctcttatctgtgccgctatctgtaagccagcgtgacgcccggcgcctgccgccgggttgttttttccttcctgcccggcaggaaggaaagcggcgcttagcgctgcgcttcgccgccgagcccttccaccaggctttggatcagggcagccagctcgccggtcattaagataaagtcggcgtcaaagcgctgggcgaaatcttcccgatcgatatcttcgttttggtcgcgcagttcatcgcagaacttgaggcgcttaattgacgcgtcgtcgcagatcacaaactgaatacgctgctgccagtccagcgccagcttggtgacgaccttcccggcctcaatgtgtacagcgatttcgtcgctaaccagatcctgcttcttggcgcggatcacgccgccatcttccagcatcgctttcagctcggcttcgtccagcagctggaagccctgcgccacggtgccggagcggacccactcggtcagcgttagctcaatcggattctccagggtcagcggcaccaccggcagcgagccgagggttttacgcaacagggccagagtatcttccgctttcttcgcgctggcgcagtcgaccatgatcaggccgttgacggtgtcgatccacatcattgtctggctgaagcggctgaaggcgcgcggcagtagcgagtgcagcacttcatctttcagggaatctttctcggtcttcttcagcttgcgcccctgatcggcttccagcttctggatctttgcctccagcgcctgcttaatcaccggcgacggcaggatcttctcttctttacgcgcgcagataatgatctggccgtttgccgtatgcgtcagcgcgtcgctgtgcgatcccatcggcgacacccaaccggttttcgccatatcctggctgccacaaggggtaaatgtcagctcggccagctgtttttccatctcctcggcgcgcaattcgatatcgcggctgagacggtaaaccattaaatttttgaaccacagcatgataatttccacggctttgtcgttaaatcaggcgggcatgatagcgaattgtcgctatgcttgcattgttaatcggggtgaggagctgagcgtgcgtattggtattgatttaggtggaacaaaaaccgaagtgatagccctgagcgatcagggagagcagctgtttcgccaccggttacccacgccgcgggaggactaccggcaaaccatcgagaccatcgccactctggtggcgatggccgagcaggcgaccggacagcagggtaccgtggggatgggcattcctggctcaatttcgccttataccggggtggtgaaaaacgccaactcgacctggctcaacggccagccctttgataaggacctcagcctgcgccttgagcgggaagtccggctggctaacgatgccaactgtctggcggtgtcggaagcggtggacggcgcggcggcgggggcgcaaacggtattcgcggtgattatcggcaccggctgcggcgccggggtggcgctcaacgggcgggcgcatatcggcggcaatggtaacgctggcgaatggggacataacccattgccgtggatgaacgacgatgagctgcgctaccgtgcggaagtcccttgctactgcggcaaacaggggtgtatcgaaacctttatctccggcaccggtttcgccaccgactatcagcggctgagcggccaagggttaaccggcagcgagattatgcgcctggtgggagaaggtgacgaaaaggctgaactggcgctgagccgctatgaacagcggctggcgaaatcgctggcccacgtggtgaatatcctcgacccggacgttatcgtgctgggcggcgggatgagcaacgtcgaacgactgtatcagacggtgccggacctggtgaagcagtgggtcttcggcggcgagtgtgaaacgccgatccgcaaagcgatgcacggcgactccagcggggtacgcggcgcggcctggctgtggccgctccaggggacctgaaccgcttccccgccccctaaccctctccctcgggagagggttagggtgaggggacatcgccataattcagacctcactccaccgcaaacgctttgtccagccggctatagcccaggccgttaatcttcttcactttgatctgcaccggaatgcggtctttcatcgcctccacgtggctgatcaccccgataatcttaccgctagcgttaagggcatccagggcgtccagcgccgtgtccagcgtttcgctgtcgagggtgccgaagccttcatcaagaaacagggagtcaatccgcgtcttatggctcaccaggtctgacagcgccagggccagcgccaggctgacgaggaaactttcgccgccggagagggtgcgggtgtcgcgcacggcgtcggcctgccaggtatcgacaacctccagctccagcgcctcgctggccttgcgctgtagcagatagcggccatgcaggcggttgagctgctggtttgccagccagaccagattatccagcgtcagcccctgggcgaatttgcggaaccggtcgccggtgctggagccgatcagcgaattgagatagccccagtcgtccgccagctgcgccgcctctgcaatctgctgccccagcgcctgctgctgttgacggctctctgcgtcctgcctgagctgctggcggatctcaccctggcgggtagtgttatcccgcagccgctgggccagggcgtgcagctgggtttgcagtgtggggacgtcagcgtccaccccttgcggacgcagcgccaggtgcgcctcatgttgccgggtcgcctgctcgcagagcgcggccgcctgctgaagctgctgctccagcgtctgttttagctgcgtcagccgctgggcggtctcgtcatccagcagggcggcgaggaacgcctcccgatcgctaaagcggctggcggccagggcggaggtgaattgcgcctgcgactggtccagacgcgccttttcctgggtttcctgctgctgctgggcgacaagctggctgtgcagcgacaggcattcctcgtggatttcgcgccagttgtccgggatggccgactcagcttcaacctctgtctcgtcgctggtcggcagcgtctccagcagtggccgcagagcagcgatttgctgctgaatggcatcatgttgggtctgttgcgcctgccactgggcaaattcgctttcgcgagcgtgcagccaggcggcttctgtcccttctgccggcaggctcagggccagggcctgcagggcgctctccagtccctggcgcgtggccgccagctgctgctcggcatggcgctccagcgcctgctgatcgttaagctgattctgcaacatcaggcgctggctgagctgatagagctgctgctcgtagcgctcctgctcctgcatccagtcgtttatctcttgcgcaatatcccgcgtgatgtgcagagaggcgcaggtctcctgccacgctttagtaagcgcttgctcttcctctgcgagccgcccggccgcttcggtgtcacgctggagctgttgcgtcagggccttgacctgcccgaggatcagcaggccttcttctttcagcgcggcgacctccttttccagcgcatcgcggcggcgctgattatccgtgagcgtcaacgaggcgtattgttcaatcgccgggtgttcacaggcgccgcacagcggacagggctttcccgcctcgagccggtcgcggtagctttccaggtctttaatcgtttcttcccgctggcagagcgccttcaggtcgagatagtgctggtttttgtctttatattgttcccggcgcagcgtcagggtagcgttaagttttacctgctccgcctgcgcctgctggacgctctcggcgttctggcgcagacgcttgcgcagcagctggtgctgctcatgcagggagatcaggcgctggcgcagcggccgcgattgggtttgctgttctatcgctgcggcaacgtcatccgcgctcagggtgagagggctggctggcagcgtggccagcttctggcgtagcgcggccaggcgggtgctctgagccgttagctgttgtttatcccgcgtcagttgcgagaattgcgctcgccagccggcgatctcctgaccccataagcggaaacgctcatgggcggccagccactgcgccagatcggccagttcagcctgacgctgctgctgagcacgcaaggcgccctggcggatgcgcgcgcgcagcaccgtgctggcaagtaagcgagcatttacttcactgatccgctgccgggtttgcgccaggcctgccgtctgctcctgctggcgctcccacaggggacgcagttgggcggcgggctgggccagctcaagcttcgccagcgccggggcggcgtccgccagcgcctggcgggcctgctgctgccgggtggcggcctgctgctgctgctgcgccagctcgtcgcggcgggtcagccactggagctgctgctgctggctctgctgctgggccagcagggctttttcttcgtcagtaagtacctgcaaacgttcctgcagcgcctgctgctgggcctccgtcaacaggacgatgcccgccgcctgggcttcgaacttctccagcgcatggcgagcggctttgtgctgttcgtagaccatggcagaaatctggccgtagatttccgtgccggtcagctcctccagcagctccgcgcgatcgctcggcttcgcgttcaggaaggcggcaaattgcccctgggaaagcagcatcgagcgggtgaagcggccatagtcgaggccggtaagcgtcgcggtttgctccagcttgtccgagactttatcggcgaggattttgccgtcagcgcagcgcgccagctcgacgcggggcgcctgcagattgccatccggctggttacgggcccggttctggctccagaaagcgcggtaggcgatgccttttacttcaaattcgacttccgccagacactcggcggtatcgcgggtcatcaggtcgttttgcgactgggagaccttgttcaggcgcggcgtctcatgatagagcgccaggcaaatggcatcgagcagcgtggttttcccggccccggtggcgccggtaatggcgaacaggccattgctggcgaacggctcggcggtaaagtctatcttccattcccctttcagggagttgaggtttttcagacgcagactgaggattttcatgcgttttcgttctccgcggtgagcgtatgcaccgtatgggcgaacagctcatgcagccgggcgcgcttcatatcgtcaatttcggtcagcgccagccggcgctcgaatacctcctccaccttcagttcactgagcgtctcccgctgggcgttgagcagtattttctcgcgctgctcgcggctgcggcgcaccagcagcacttccaccggcagatcctccgtcagcgcctgaatatgccgctgaatatcgtgcagatagtcctcggtggtgatttcgatatccagccacaccggcgggtcctgctcgacgccgcgccactgctccagctgggcggtgatggcggccagatcgcctttgattaccgccagaggctgggtcacgggcacctccagggtttccacggcgctaagtcgcccctcgctaaagctcaccagatgcaccgatttcgctttgccggtttcatcgaagctcagcggcagcggcgagccgctgtagcggatatgctcgcagccgccgaccatctgcgcccggtgaatatggcccagcgcaatgtagtcggcaggggggaagtgttgcgccggaaaggcatccagtgtgccgatgtaaatgtcgcggacggcatcgcttttgctggcgccgacggtggtcagatggccgctggcaatgatgggcagcggccgatcgccgcgcagcgcgcaggcctgctgatactgctcctgataatagtcgctgatggcgtgcagcagcagctgctgtttttcccgaccggagtgaccggcctggctggtcaccagctcgcgcgggcgtaaaaacggcaccggacagaagatggcgcccggcgtgccgtcgcgcagcggcagctcaatcggcgcgtagccggcgttcgccaccacggtggtgtgtaagaaggcgaggatatcgcgggattcattgagcatcgccaccgagtcgtggttgcccgccagcaccaccaggcgacagccggtctgctgcaactggacgacgaaacggttatacagttcgcgggcgtagctcggcggcgagccggtatcaaaaatatcgccagccacgataatggcgtcgacttcatgctcctgcgcgcggtccagtagccaggtaagaaaagcgtcgtgttcggccgcgcggcttttgctgtaaaaattctggcccaggtgccagtcggaggtgtgaaggaggcgcataaatcttccctagcgaaaaaagcatgggcggcagtataccacttgttagtgaggggtaagtccgcgtcgtgcttcaaaatacccgatcatcagacggtcatttttttcataaatctgtcacaaaagtgacgcataatgacgccgcacttctatactgatggctaaaaaacacagggtaaataatggcgagaagaattctggtcgttgaagatgaagctccaatccgcgaaatggtctgctttgttctggagcaaaatggctttcagcctgtcgaagcggaagattatgacagcgcggtgaatcaactcaatgaaccctggcctgatttgattctcctggactggatgctgccgggcggttcggggctgcagtttattaaactgctcaagcgcgaggcgatgacgcgggatattccggtagtgatgctgaccgcgcgtggagaagaagaggatcgcgttcgcggcctggagaccggcgcggatgactacatcaccaagcctttctctccgaaagagctggtggcgcgaatcaaagcggtgatgcgccgtatttcaccgatggcggtggaagaggtgatcgaaatgcaggggctgagcctcgacccttcatcgcaccgggtaatgaccggcgacagtccgctggatatgggaccgacggaatttaaattattgcacttctttatgacccatccggagcgggtgtacagccgtgaacagctgctgaaccacgtctgggggaccaacgtttatgtggaagaccgcacggtggacgtccatattcgccgcctgcgcaaagcgctggaacacagtggccatgatcgtatggtgcaaacggttcgcggcacggggtatcgtttctccgcccgtttctgaattttgacaggagtgtgacccgtgctggaacggctgtcatggaaaaggctggcgctggagctctttttagcgtgtattccggccctgattctgggggcgtttgtgggtcatctgccgtggtttttactggcggcagtgaccggtttgctgatctggcatttctggaatttgatgcgcctgtcgtggtggctgtgggtggaccggagcatgactcctccgcctggccgcggcagttgggagccgctgctgtatggtctgcaccagatgcagatgcgtaataaaaagcgtcggcgcgagctgggaagcctgattaaacgctttcgcagcggggcggaatcgctgccggatgcggtcgtcctgaccacggaagagggggctattttctggtgtaatggcctggcgcagcagattctaaacctgcgctggccggacgacagtggccaaaacattcttaaccttctgcgctatcctgagttcgccaactatctgaaacagcgcgatttttcaaagccgctcaatctggtgctgaataacgcccgtcatctggaaattcgcgtgatgccctacagcgacaagcagtggctgatggtggcgcgcgacgtgacgcagatgcatcagctggaaggggcgcggcggaactttttcgccaacgtcagccatgagttgcgcaccccactgacggtgctgcagggctatctggagatgatgcaggagcaggtgctggagggggcgacccgagaaaaagccctgcacaccatgcgggagcaaactcaacgtatggaaggtctggtgaagcagctgctgacgctgtcgcgtattgaagccgcgccggcgctggcgatgaatgatcgcatcgacgtgccgatgatgctgcgggtggtggagcgcgaggcgcaaactctcagccaggagaaacagacgctgatcttcaccgtcgatgagcagctcaaggtgctgggtaatgaggagcagctgcgcagcgccatctccaacctggtctataacgcggtgaaccacaccccgccggggaccgaaattcgcgtcagctggcagcgaaccccgcagggagcgctgttcagcgtcgaggataacgggccaggcattgcgccggagcatattccccgtctgaccgagcgtttttatcgggtggataaagcccgttcccggcaaacggggggcagtggcctgggactggcgatcgtcaaacacgcggttaaccatcatgacagccggctggaaatcgacagcacggtgggcaagggaacccgctttagcttcctgctcccggaacgattaattgccaaaaatgacgcctgatcgacgcgctgtcagtttatcttgccaatgaccagcttcagctggtcattttcattggcagtcgttttttctcgcctatttaatgagcgtgcgctgcttttttgttcgcatgataagccacgggttttctatcaatatggtaaatgattctggtgtgaaagacataaccagcataatcatctgcttttgcgatcgtgccttgctttaaaacgttataagcgtttaaattgcgcctgcgcagtcgatgacagactgcttttgcgtggtaataccaaaaacaattctttcccacgccgcttcgggagcatatctcgctgagtttaccggcaatggccgctgtatcgtccctgagaggggagcgcggtatttttccattttttttacaacaccacatccacaggcagtaatgaatttatgacccatcagttaaaatctcgcgacatcatagcgttgggctttatgaccttcgcgttgttcgttggcgcaggcaacattattttccctccgatggttggcttacaggcgggcgagcacgtctggacggcggcgatcggcttcctgatcactgcggtgggtctgccggtgctgacggtggtggcgctggcgaaagtcggcggcggcgttgaaagcctgagcaccccgattggtaaagtggccggtatcctgctggcggtggtgtgctatctcgcggtaggaccgctgttcgcgacgccgcgtaccgcgaccgtctcctttgaggtcggtattgcgccgctgaccggcgacggcccgctgccgctgctgatctacagcgttatttacttcgcgctggtgattctggtctccctctatccgggcaaactgctggacaccgtgggcaatttccttgcgccgctgaaaattatcgccctgattgtgctggcggtcgccgccatcatctggccagcgggcccgatcagcgacgcgctggaagcgtatcgtacggcgccattctccaatggcttcgtcaacggctacctgaccatggataccctcggcgcgatggtgttcggcatcgtgattgttaatgccgctcgctcacgcggcgtcagcgaagcgcgtctgttgacccgctataccgtctgggctggcctgatggcgggcgtcggcctgaccctgctgtatctggcgctgttccgtctgggctctgacagcgctactctcgtggatcagtccgccaacggcgcggcgatcctccatgcctacgtgcagcacaccttcggcggggcgggcagtttcctgctggcggcgctgatcttcatcgcttgcctggtgacggcggtgggcctgacctgcgcctgcgctgagttctttgcccagtatctgccgttctcctatcgcacgctggtctttgttctcggcctgttctccatggcggtctccaatttgggccttagccatctgatccaggtatcgattccggtgctgaccgctatctatccgccgtgtatcgcactggttgtattaagctttacccgcagttggtggcataattcgtcccgcgttatcgcgccggccatgtttatcagcctgatgtttggtatcattgacgggattaagtcatcggcatttgccgcgattctgccggactggaccgcgcgtctgcctctggcggagcagggcctggcctggctgatgcccaccgccgtgatgaccattctcgcggtgatctgggatcgcgcagccggacgtcaggtgacttccagcgcgcattaaccggcggtgaggacaagcgtttaaccacgggacttcgggttccgtggttttttattttttgtgttaaacggcattgaaaaaccacgatggaaagtagtaacaagcttaagcgcgggctaagcacccggcacattcgctttatggctctgggttccgccatcggcaccgggcttttttacggctcggccgacgccattaaaatggccggacccagcgtactgttggcctacattatcggcggcgtcgcggcatatatcattatgcgggcgctcggtgagatgtcggtgcataaccctgccgccagctcattctcccgctatgcccaggaaaacctcggcggactggcgggctatatcaccggctggacctactgctttgaaatcctgatcgtcgccatcgccgacgttaccgccttcggcatctacatgggcgtctggttcccgacggtgccgcactggatctgggtgctcagcgtggtgctgatcatctgcgccgtcaacctgatgagcgtcaaggtgtttggcgagctggagttctggttctcgttcttcaaagtggccaccattatcatcatgatcctcgccgggttcggcatcattatctgggggatcggcaacggcggccagccgacggggattcataacctgtggagcaacggcggcttcttcagcaacggctggctgggaatggtgatgtcgctgcagatggtgatgttcgcttacggcggcatcgaaatcatcggcattaccgccggtgaggcgaaggacccggagaaatccattccgcgcgccatcaactcggtgccgatgcgcattctggtgttctacgtcggcacgctgttcgtcattatgtccatctacccgtggaatcaggtgggaaccgacggcagccccttcgtcctgaccttccagcatctgggcattaccttcgcggccagtattcttaacttcgtggtcctgacggcttcgctgtcggcgattaactccgacgtgttcggcgtgggccgtatgctgcacggcatggctgagcagggcagcgcgccgaaggtgttcgctaaaacgtcgcgtcgcggtattccgtgggtgacggtgatggtgatgaccattgcgctgctgtttgcggtatacctaaattacatcatgccggagaacgttttcctggtgatcgcctccctggccaccttcgccacggtgtgggtgtggattatgatcctgctgtcacagatagccttccgccgccgtctgtcgcccgaagaggttaaggcgctgaaattcaaagtccctggcggggtggtgaccacggtgatcggcctgctgttcctggcctttattatcgcccttatcggctatcatccggacacccgcatctcgctgtacgtcggtatggcgtggattgcgctgttgctgctcggctgggtctttaagacccgccgtgagcgccgcctggcgcaggctcagtaatcgacatcgccccggtcagcatcgcgcggccggggcggcttgcggtcccgcgtcctcccccgttatcctcccccaaaaagttctgagatgatgagttctgcgcccggcggctatggcaaggtgtgcccattctgcacaatgaggattcacgatgttgaaggcatggcaccttccggttgcaccctttatcaaggtgcaacaggaccgactgtttattactctgtggttaagcggtgagtcgctgccgcagcggatcacgctgcgcgcggaagaggataacgaagagctgtcgctgccgatgcagcggctccgccaggcgccgcagccaggcgtggtggcatggcgcggcgaaatctctctcgccagcggccagccgcgccgccgctacagctttaagctgctgtgggccgaccatcagcgctggtttacgccacaaggcttcacccgattcccgccggcccgactggagcagttcgccattgacctgccggacgccggcccgcagtgggtggccgatcaggtgttctatcaaattttccccgatcgctttgcccgcagcgccgcgcgtgacgccgaccaggatgcggtctattaccatcacgcggcgggacgggagattgtgcgcaaggcgtgggacgacccgcttaccggcgaggcgggcgggtcgacgttctacggcggggatctcgacggcatcagcgaaaaacttccctacctgaagcagctcggcgtaaccgctctgtatctgaacccggttttcgccgcccccagcgtgcataaatacgataccgaggattatcggcgcgtcgatccgcagtttggcggcgacgcggcgctgctccggctgcgccacaacacccagcgggcgggaatgcgcatgatcctcgacggcgtgttcaaccataccggcgattcccatccctggttcgaccgtcaccagcagggcagcggcggcgctggccacgatccggactccccgtggcgcgactggtttaccttctcagaggaggggcaggcgcacaactggctgggctatgccagtctgccgaagctcgactatcggtcgaccagcctggtcaacgagatctatgccggtgaagacagtatcgtacgccactggctgaaggcgccatggagcatggacggctggcgtcttgacgtggtgcatatgctgggcgaaggcggcggggcgcggaataacctgcagcatatcgccggcattacccaggcagcgaagcaagcgcagccggaagcttttgtctttggcgaacattttggcgacgcgcgccagtggctgcaggcggatgccgaagacgcggcgatgaactatcgcggcttcaccttcccgatctggggattcctcgccaataccgatatctcttacgatccgcagaaaatagacgcccagacctgtatggtgtggatggataattatcgcgccgggctgtcgcatcagcagcagctgcggatgttcaaccagctcgacagccatgatacggcgcgttttaaatctcttcttggcaaagacgtagcgcgcctgccgctggcggtggtgtggctgttcagctggccgggggtaccgtgcatctactatggcgacgaggtgggcgtggatggcaataacgatccgttctgccgcaaaccgttcccgtgggatccggcgctgcaggatacccagctgctggcgctgtatcagcggatggcgaaactgcgtaaggcccaccaggcgctgcgctacggcggctgtcaggtgatttacgccgaggataacgtggtggtgtttgtccgcgtctacaaacagcagcgggtgctggtggcgattaaccgcggggaagcctgcgaggtggttatcgaagattccccgctgctgaacgtggccgggtggacgctgcaggagggcgccggcgccttccaggacggggtgctgaccctcccggccatctccgccaacgtctggtccggccgttaatggtagagctggctcagcaggtcgccgcggaggagcgcctcccgccaccagcgctgagccagcccatcattcccgctgcgccaggccatataggtaatatccttttcccgccagcaggcgacgcttttctccaccagactgccttttaccagccacgggcgagcgatatggcgcggcagaaagccgcagcccagcccggcgcacaatagttcgactttactggcgaaatcatcgacgccgatttgcggctgctcgtcgaggagattgctgttgagcggatggcaatagcgggcgctgtcgcggatcacgatggcccgatgctggctgagctgtttattggccagtggctccttcgcctgagccagcgggtgatggggggcgacgacgaagatgttatccaacgcgccgagggtttgccatgaccactccgcggaggtgggcggctcattgatggcgccgaggataatatccgccccatgatgggtcagctcttcccacgaaccggcgagggtgtgatggctgaagttcagtcgcgtctgtgggttttgcgcgtaaaactcggcgatcagcggcagcagggccgaaaagggaaatgaggcgtcaagggcgatggctagctctcgctcccagcccgcgctcagctgctgggcctgcttttccagatctctggcggcacttaaaagctgtcgccccttctccagcatcagccgcccggtatcggtaaattttgcccgatggccggaacgatccaacagcacgatgttcagatcgctctccagtttctggatcatatagctcagagcggcgggggttttatacagcgactccgcggcggtggcgaaggatccgtggcggtcaagggcatcaaggatcatcaaaacatcaaagtttacgcgcatatgaagctatccattaatttgttttctctgttgtacctaagcgcaataatcaaagccagtgaataaatcagaacagtttggcgtaaaaatttgattaaaacaggcgtgaataaatcctggtcgcggcaaaaaatataaaccataaaaaatccttaataacttgttagaaataactggctatactcaccatgctttatcagtcaggatccacacgacgcattaatcnnnnnnnnnnctttttaactaattgattaagaaggtatttaatgtctattcgtgaactgctcgatcccactaattccgcgcttatctttattgaccatcagccgcaaatgtcctttggcgtggcgaatatcgatcgccagaccctgaaaaataacaccgtggcgctggcgaaagcgggcaaaatttttaatgtgccggtgatttatacctccgtagagaccaaaagctttagcggctatatctggccggaattattggccgtgcatcctgacgtcaagccgattgaacgtacctccatgaactcctgggaagacgatgcgtttgtggcagcggtgaaagcgaccggccgtaaaaagctggtgatctccgctctgtggaccgaagtctgcctgactttcccggcgttgatggcgctggaggcgggctacgaggtctatgtagtgacggatacctccgccggcacctctgtcgacgcccatgagcggtctattgaccggatggtgcaggcgggggcggtgccggtgacctggcagcaggtgctgctggagtaccagcgcgactggtcgcgcaaagcgacctacgatgcggtaatggacctggtgcgcgaacacagcggcgcctacgggatgggcgtggattacgcttataccatggtgcatggcgcgccggagcgtaaagcgtaaatcactccatccttcaggctgctgcgttgttggctgcgtttgtccgtccccagctactgaatttattcaagttcacggggacgtgcccgcctgccgcttcaacgcagcatgaaggatgttgtgtcagatcatttatggagagtggcaggagaaaaccggccatttccctgaagcaaggaactcgtcatggcgcagcaaaaatcggtgaccctggttatcagccatctgctcgatccgcaacacagccagcgctacgaagagtggctcggtaaaattatgcccattgcggcagaatttcccggccatcttggggcgaatgtgatccggcccgccgcagggcagaatctgtggagcgtcataatccgcttcgataccctggagcacctctacgcctggacgcagtcggaaacccgtcggcaactggtggctgagattgccccactgctgacggaaggcgatcggactgaggtgcggactgaaccggccttctggtttaccccgccgacggtgaacgtacgccagccgcggcgctggaaacagtttctgatcaccctgctggtgattttccccagcaccaacctggtgcctgcggtgaccggcatgctgctgccgtcgcttaaggggagcctgctgctgcacctcatcaatgatgcctgcgtggttgcgctggtggtctggttctggatgcccatcgtgacccgcctgtttgctggctggttgaagaaaaactgagtcagcctcctcaaggagtgcgttatgtcgcaaactgccacactgattctgacccacggtcagattcataccctcgatcgtgcgaatcccctggcggaagccgtggccatcgccgacggaaaaattgttgccaccggaagtcacgatcggatcatgagctttgccgccgaggggacgcaaatcgtcgatctcaaagggcatacggtgatcccgggcctcaacgattctcacctgcacctgatccgcggtgggttgaactacaaccttgagctccgctgggagggcgtcccctcgctggcggatgccctgcgaatgctgaaggatcaggcggatcgcacgccgtccccgcagtgggtgcgggtggtcggcggctggagcgaatttcagttcgccgagcggcggatgccgaccctggaagagctgaacgaggcggcgcctgatacgccggtgtttgtgctccatctctacgatcgcgcgctgttgaaccgtgcggcgctgaaagccgtggggtatagcaaagagacgccggatccggcgggcggcgagatcgtccgcgatagccacggcaacccgaccgggatgctgatcgctaaaccgaacgccatgatcctttacgctacgctggccaaggggccgaagctgccgctggatctgcagctgaactccacccgtcaatttatgcgcgagctgaatcgactggggctgaccagcgccatcgacgccggcggcggcttccagaactatccggaagattacgaaattatcgaacagctgcacgcgaaagatcagatgaccgtgcgcatcgcctacaacctgtttactcagcggccgaagcaggagctggaggattttgaacgctggaccgacatgctgaagccggggcaggggactgacttctatcgcgccaacggcgccggcgagatgctggtattttcggcggcggattttgaagatttcctgcagccgcggccggatctgccgcaaggcatggaggatgagctggagcgggtggtacgccatctggtggagcatcgctggccgttccgcctgcatgccacctacgatgagtccatcagccggatgctggacgtgtttgagaaggtgaaccgcgatatcccgtttaatggcctgcactggttcttcgatcatgccgagaccattaccgagcgtaacattgagcgggtgaaggcgctggggggcggtattgcggtgcagcatcggatggccttccagggcgaatattttgtcgatcgctacggcaaagaggcggtgaaacataccccgccggtagcaaagatgctggcgctggacgtgccggtggggctgggcaccgatgcgacccgcgtcgccagctataacccgtggaccgcgctgtactggctggtctccgggcgcaccgttggcgggatggcgatgtatgacgacgccaaccgcctgccgcgcgatgtcgcgctggagctgtggacggcgggcagcgcctggttctccagcgagcagggcaagaaaggccgtctggccgccggtcagcttgccgatctggtggtgctgtcgaaagactacttcagcgtcgcggaagaggagatcaaaggcattgagtcggtgctgacggtggttgacggcaaagtggtgtacgccgccggtcacttctcgccgctggcgccgccgcctattccggtgctgccggagtggtcgccggtggtgaaggtcccaggccattaccgttccgctccgccggcgacggctaaaatcggcgccatggtgcagatgcaccagtgctgcggtagctgtggcgtccacggccatcagcatgatattgcgcgtaagtcgtcgattccggtctctgacgagcaggccttctggggcgtgctgggctgttcctgctttgccttttgatacctgacgccaccgccccggcagcgtcggggcggtggtttcagccgcaggcccggcgtcaatagcgctgctctgagccaaagagcgccatgcggcgggcaatcatctcgcgtaccggctgcagtccctgggcgatgactttccgcggatcgttcacatcgtgtccggtgtcggcggcgaaaattgctttcacctgttggcaccaggcgtacatattttcggtattaacgttaatcttggcggtgccgcaggcaatcgcccggcgcatatcctcatcggcaataccggtgccgccatgcagcaccagcggaaccttcacctgctcggcaatggctttcatctcggtaaatcccagccgggctttacctttatacagaccatgggtggagcccagcgcggcggcgaggcaatccacctgggtttctgtcaccagggtgtagcactcctgcggatcggcgtagatgacttcggaattgacaatgccgtcttcactgccggcgatggtccccagttcggcctccacagagatacctttgctgtgggccagcgtcaccaggtggcgagtaatggccaggttttccctgaacggcagatgcgagccatcaaacataatggaactgaagccggcggcgatcgccgcttcgcaggcctcccgggaggtgccatgatccagatgcagcgccaccggaacatcaatatgcaaatactccatggcgttaaccacaatgtcatgaatacattttaacccgagcatatgcttaaccgtgccgccggacacccccaaaataaccggtgagcggcactgctgggcggtgcttaatacggcgccgacccattccagattattaatgttgaactgaccgacggcgtagccgtcccgcagggcatgctgaagcatgtccttcatcgacactaacatattcacctcttgatatttattaaatgcagttattcttcaaaatattgcgttaagtttctctcgtagctatttaacgagtggtggacgaccgccaggtccggcatcgattcccgaaccccttttttctcaatagaaatggcggcggtcaggctggcaaataaaataatgttatcgatatgccatgagtaatggacgccataggtgaaggcgccgtgaaatacatccccggcgccggtggtatcaacagcattgcacagccaggacgggacgatctgcagcataccgctttttaaaaaagcgcagcctttttcgccaagggtaataaatgcttcaccgcggcaaattttattcaactcaatcagggccgctttaatttctgcttcggtgctcagcgagcgatagctcatataatcgcgggcgaaatgttcgctcactacaaaatagtcagtccaggccgccagtttaatattgctggcgcgcagtgacccgccgtccatcacgaccctggcgttgggcagtttcttaattaaatattcactgatttccgcctcatggccgtcaattaaaatggtgaccggctcctcgctggcaatcagtcgctcggcgaggtcgtccagtttgagcttttgctcgtaggtcagggaaggcggcgtttgcatcttgcgggtaataatcgtccgcgaacccgttaagcgattgaccagcaccgaggccagcggggtgatcatgtcatcggagaaaaccacctggctggtatccacccccgcctcggcaaactcatcgataatgcgctgaccgtaaaggtcctgctgcagatgaccaatgtaataaacctcctcgccccataatcccagcagccaggccgcattggccgccggaccgccgccgctttcaataaaatcatgacaaaagtttttggtattctcctggggccattcattgagaaagaaaaactgatcgaaacaagcaaatccaatggacaaaatagccataaccactcctgattatttgtcagcggcggaaagcgtggccctcccgccgggaaaaatgacctcgcttattcatttttctgcttcgccgtcagctcctcatagctgagcgtgttgcccaccacctggacgtgacggaagcagaaaggcgccagcagcgcgacgagcagcgccagacaaatcagatagatagtgatctgaccaaactgggtgaacgcattcccgataatgatgccccataccgcgaagtcgaaatcggcgaaggtgctgttttcaaacccgaggttgccgagcgccggcagcagcatcgccggcaggaaggcgaggaagatcccgccgataaaggaggcgatgatacatccgcgcttaccgcccagtttgtcggcgaagacgccggacgtgccgccgcagaagaagtgcggcaccatgccgggaataatcagcgccatgcccagcccgccgagcaagagcatcccgaccagcccgcccacaaaggagctgatgaatcccaccaccaccgcggtggggctaaaggtgaagaacaccgcgcagtcaacggccgggatggagtccgggatcagcttctggctgatgccctggaacgccggcaccagatcgccgaggatcagccgcacgccgttatagacaatggctacgccaacggcgaactgcagaccggtcagcaccgagaagatcagcatgttttggtcggtgatggtgctcaggtacgccgacccggcgacagcgctgcagacaaagtagataacaaacatcacgataccggtggtgaccgtggtatcgcgcagaaagccccacttttctgaaatttcggtatcggcgaaggaatttgccggattgccggtccggctggcgatccatgccgagaggtagtagccgagagagccgaaatggcccatggcgatcccgccgtcttcggttacctgcctggtgtaacgctgaccgatggccggggagatggccgaccatgagcccaacaggaatccaccgatcaggatcaacatccagccctggaactccgccgcctgcagaacggcggagaacaggcaggcgagaaagaacgaatgatggccggtcagaaagatatatttatacttggtacagcgggcgataatcaggttgaaaataaagcctaacagtaaaatactcatggtttccacgcccagcatcttctgggcgacggagacaatggcttcattgttcggaataacgccgcggatattaaatccggcctcgataataccgcccagcggattgagattggcaacgataacgcctgccccagcgctcaacatcaaatagcctaaaatcggcttcaatgtgccggtaagcagtttattgccaggggagcgcagcgccactaaaccaacaaaggcgataagccccattaaaaaggcgggttgactgaatatttccgttaagaaactaagaatagcctgcatggtcgttccctctatgctgattaagagtgagtcgcagcaattttcatcagcgcgtcggtaatatcctcggcgatcttcgctttatggacgtagctgcgaatgatggcgacatgacagtgggccggaaattgatttgccagttctttgatcgtgacgtaaaggtcggctttttccccgacggcgttagcaaaatcgaccgaggcgacgtccgctttgatgcctaattcgtcacagatctttttcacattattcgcagccatcaatgagctgccaataccgttaccacaaaccgttctgataactaacataatgactactccatttgtttttgaatgaaatgtaagactgaattaacgtcattttcctgctgaagaaaggtcacaatatctgactcgatcagcgaggctatcagttggatcattttgatatgactgtcagcatcggcgccggcgatcgcgatgaccacggaaaccggatcgaactcatcgtggccgaaggagattggcgtggcggtggtgacaagtgagaacccggtctgtaatgcccctttttccggccgggcatgcggcatggcaatcccgtcatctatcacgatggcggcgccaaaatcttcatataccgtcagcatctcgttgacatattcggcgctgcaaatctggcgcctggcaagtaatgaacccgccagttcgatggcctcttccgcacgggaaatattctgcttaagggcgattaacgacgggtcaaaaataatttccatcctcagctcctgaacgtattcctgttcctgagttaaatcatgaccaaatacattgatgaaaatgatggatgagatcacatccgcggttttaaatattgatggggatcacatcgacggcaaagtaccggcagaaaacgatataaataatttatatgtttttcaggctgttatgaaggctttgtattttgacgctgaaatttgccagagaaaaagtgagaggtagggcgaattttttcggcagaagtgtatcgctggtcacaaatatcggcgggtcattttcttaaattttgacgccgctaacaaaaaaggcccgcctgagcgagccttttattaaaacgcgtgccgattacaggctggagacgttttcggtcaggtattttgcaacgccttccggagaggcggccataccttcttttcctttttcccactgcgccgggcagacttcgccgtgctcttcgtggaactgcagggcgtcaaccatacgcagcatttcgtcgatgttacggcccagcggcaggtcgttaaccacctggtggcgtaccacgccgttagcgtcgatcaggaaagagccgcgcagcgctacgccttcgtccggatgctcgataccgtaagctttctggatttcacgtttgatgtcagcaaccatcgcgtatttaaccgggccgataccgccctggtctaccggggtgttacgccatgcgttgtgcacgaactcggagtcgaaggaaacgccaaccacttccacgccgcgtttctggaattcttcgtaacgtttgtcgaacgcgatcagctcagacgggcacacgaaggtgaagtccatcggccagaagaacagaacggtaggtttaccgttggtgtgctgtttgaaattgaatttctcaacgatctcaccattacccagcacagcggctgcagtaaaatccggcgcttgacgagtgaccagaaccatttgattctcctgtaattactaaggttatttggaacgcaacgcgggcaagtatagagcctgcccggcaataacacaaagaggcgctaacaatcgttcagccagcttttacctatcaatgacgtggctattacagctgtttgttttctgcctggcgcatcatctgcggataaaagcgccagaactgtgtctccagacggtcgtaatgggtatccagatcctgccaggagtcgcgtagcgcctcgagacgtggacggcggctggccatgccgttcagcacgcgctgaataaaatccatttcccgatagcgctccagccagcgctccgaccacagatattgattgagattgacgaagcggggcggcgagtcgggcaggatggggacgatctgccgctcggcgtagcgtacgaactcgtccagcggcaggtcaggggagagctgcgcccagtgctgggacaggaaatgatcccacatgacgtcgagggtgatgggggcgacgcggcgggtctgcgggcgaaaccactcccgcgcctctttgacttccgccaggttgtcagtcatcacgtcaatccgccgatgcataaagatgccgtcgatgatctccgccggatagtcgccctgcgggttgccgcgcacgaagtcggccatcaggttgccgggcaacgaactgtcggcgagatgggccaggtgcaggtgggcgagaaaattcataaaacgacatcctttaaatacgagcgggcaggtggaaacaccgatgttgcgctgaacggcgcctcggtggccgaatggcatgctgtctggccgcgcgcggcacctttgccaccggtaaggcattcggttgccgcatggcggcattcggaatgatttggaatatagattatgtcattcatccggaggggtaaaggttgcagccagaccgccccggcactagactacccgcctctttattcagtctgagttaccgtcatgcgcgttaccgattttgcttttgaactacccgaatctctgatcgcccactatccgatgcctgagcgcagtagctgtcgcttgctctccctggacgggccgacgggcgcgctgacgcatggcaccttcaccgacattctcgataagcttaatccaggcgatctgctggtgtttaacaacacccgggtgatcccggcgcgtctgttcggccgcaaggccagcggcggcaagattgaagtgctggtggagcggatgctggatgataagcgcatcctggcccatattcgcgcctcaaaagcgccgaagccgggcgccgagctgctgctgggcgatgacgagagcattaaggccacgatgctggcgcgtcatggcgcgctgtttgaagtggagtttaacgacgagcgcccggtgctggagatccttaacgggatcggccatatgccgctgccgccctatattgaccgcccggacgaagacgccgaccgcgagctctatcaaaccgtctatggcaccaggccgggcgcggtagccgccccgaccgccggtttgcatttcgacgaaccgctgctggacaaactgcgcgccaaaggcgttgagatggcgtttgtcaccctgcatgtgggcgcgggcaccttccagccggtgcgcgtcgacagcattgaagagcacaccatgcactccgaatatgccgaagtgccgcaggaggtggtcgatgcggtgctggcggcgaaagcgcgcggcaaccgcgtgatcgcggtgggcaccacctcggtacgttcgctggagagcgcggcgcaggcggcgaaagacgcgctgatcgcgccgttcttcgacgatacgcagattttcatctacccgggttatcagtaccaggtgatcgatgcgctggtgactaacttccatctccctgaatccacactgattatgctggtgtcggcgtttgcgggttatcagcacaccatgaacgcctataaggtggcggttgagcagaaatatcgcttttttagctacggggatgcgatgtttatcacgtacaatccgcaggctatttctgagcgtccctgaaaaggccggtacgccggcttgtagacgccataacgcattttttagctacggaatcattccgtggcgagtatgaaaacgtcggactgtttttctgacgcaggagcaagcatgaaatttgaactggataccaccgacggtcgcgcccgccgcggtcgcctggtgtttgagcgcggcgtggtggaaacaccggcctttatgcccgttggcacctacggcaccgtcaaagggatgacgccggaagaggtggaagccaccggcgcgcagattattctcggcaacaccttccacctgtggctgcgcccgggtcaggagatcatgaagctgcacggcgatctgcacgattttatgcagtggaaaggaccgatcctgaccgactccggcggtttccaggtgttcagccttggcgatatccgtaagatcaccgagcagggcgtccacttccgcaatccgatcaacggcgatccgattttcctcgatccggaaaaatcgatggagattcagtacgatctcggctctgacatcgtgatgatcttcgacgaatgtacgccgtacccggcggactgggattacgccaagcgctcaatggagatgtctctgcgctgggcgaagcgcagccgcgaccgtttcgatagccttggcaataaaaatgcgctgttcggcattattcagggtagcgtttacgaagatttacgcgatatctcggtgaaaggtctggtagagattggctttgatggctacgctgtcggcggtttggcggttggtgagccgaaggaagacatgcaccgtattctggagcacgtctgcccgcagatcccggccgataaaccacgatacctgatgggcgtcgggaagccggaagatctggtggaaggggtacgtcgcggtatcgatatgttcgactgcgtcatgccgacgcgcaacgcgcgtaacggccacctgttcgtcaccgacggcgtggtgaaaatccgcaacgcgaagcacaaaagcgataccgcgccgctggacgccgagtgtgattgctatacatgtcgcaattattcacgcgcttacttgcatcacctcgaccgttgcaacgaaatattgggcgcgcgtctcaataccattcataacctgcgctactatcagcgtttaatggctggtttacgcaaggctatcgaagagggtaaattagagagcttcgtgaccgatttttaccaacgtcaggggcgcaccgtgcctcctttgaacgttgattaattttaataatgagggaatttcaatgagcttttttatttctgatgcggtagcggcaacgggtgcaccggcgcagggcagcccgatgtctctgattctgatgctggtggtgttcggtctgattttttacttcatgatcctgcgtccacagcagaagcgcaccaaggaacataagaacctgatgaactccatcgccaaaggtgatgaagtgctgaccaacggcggtctggtcggtcgcgtgaccaaagtagcggaaactggctacattgctatcgcgctgaacgataccactgaagtggttatcaaacgtgacttcgttgctgccgttctgccgaaaggcaccatgaaggcgctgtaatctaacttttcccaaagggaactgccgtgttaaaccgttatcctttgtggaagtacgtcatgctggtcgtcgtcattgtcgtcggcctgatctatgcgcttcccaacctgtatggtgaggatccggctgttcaaatcactggcgcgcgcggcgtcgccgccagtgagcaaacgctgatccaggtccagaaaactttacaagaagaaaaaataaccgcgaagtctgtggcactggaagagggcgctattcttgcgcgcttcgacaccactgatacccagctgcgcgcgcgcgaagcgctgcttaacgtgctgggtgacaaatacgtcgtggcgctgaaccttgctccggcaaccccacgctggctggcggcgctctatgccgagccgatgaagctgggtcttgatctgcgcggcggcgtgcacttcctgatggaagtcgacatggacaccgcgttaggcaaactgcaggaacagaacatcgatagcctgcgcagcgagctgcgcgacaaaggcattccttacgcgaccgtgcgtaaagaagacaactacggtctgagcatcgtcttccgcgacagcgcggcgcgcgaccaggctatctcttatctcagccctcgccatcgcgatctggttatttcctctcagggtgacaacagcctgaaagcggtgatgaccgatgagcgcctgaaagaagcccgtgagtacgcggttcagcagaacattaatatcctgcgtaaccgtgtgaaccagctgggcgtcgccgagccgctggttcagcgtcagggcgctgaccgcatcgtggttgagctgccgggtatccaggataccgcgcgtgcgaaggaaatccttggcgcgaccgcgaccctcgagttccgtctggtcaatactaacgtggaccagtccgccgccgcctctggccgcgtgccgggcgactcggaagtgaagcagacgcgtgaaggccagccggtagtgctgtacaagcgggtgatcctgaccggggaccatatcaccgactcgacctccagcatggatgagtacaaccagccgcaggttaacatctcgctggacagcgcgggcggtaacatcatgtctaacttcactaaggacaacatcggcaagccgatggcgaccctgttcgtggagtataaagacagcggtaagaaagacgctaacggtcgcgctatcctggcgaaagaggaagaggtgattaacatcgccaacatccagtcgcgtctgggtaacagcttccgtatcaccggtatcagcaatccgaacgaagcgcgtcagctgtcgctgctgctgcgtgccggcgcgctgattgcgccgattcagatcgtcgaagagcggactatcggcccaaccctgggaatgcagaacatcaagcagggtctggaagcctgtctggccggtctggtggtctctatcctgttcatgatcctcttctataagaagttcggcctgattgcgacctcggcgctgattgccaacctgatactgattgtcggcattatgtccctgatcccgggggcgacgctgaccatgccgggcatcgcgggtatcgtgttaaccctggcggtggcggtcgatgctaacgttctgatcaacgagcgtatcaaagaagagctgagcaacgggcgtaccgttcagcaggcgattgacgaaggttatcgcggcgcgttcagctcgatcttcgacgccaacgtgacgacgcttatcaaagtgatcatcctgtacgcggtcggtaccggtgccattaaagggtttgcgattaccaccggtatcggtatcgcgacctcaatgtttaccgctatcgtcggcacccgtgccatcgtgaacctgctgtacggcggcaagcgcgttaaaaagctgtctatctgaggagtgcgttgtggcacaggaatatactgttgaacaattgaaccacggccgtaaagtctgggactttatgcgctgggactactgggccttcggcatttcaggttttctgctgattgtgtcgatcgccatcatcggcgttcgcgggtttaactgggggctcgatttcaccggcggtacggtgattgaaattacccttgagaaaccggtcgatctggaccagatgcgcgattccctgcagaaagcgggctttgaagagccgcaggtgcagaactttggcagcagccgcgacatcatggtacgtatgccgccggtgcatgacgccaacggcagccaggagctgggcagcaaggtcgtgacggtgattaacgaatcgaccagccagaatgcggcagtgaagcgtattgagtttgtcggcccgagcgtcggcgcggacctcgcgcaaaccggcgccctggcgctgattgcggcgctggtctgtatcctgatctacgtcggcttccgcttcgaatggcgtctggccgccggggtggttatcgccctggcgcacgacgtggtgatcaccatgggcgtgctgtcgctgttccatatcgagatcgacctgaccatcgtggcctcgttgatgtcggttatcggctactcgctgaacgacagtatcgtggtatcggaccgtatccgtgaaaacttccgtaagatccgccgcggtacgccgtatgagatctttaacgtgtcgttgacccagacgctgcaccgtaccttgatcacctctggtaccactttgatggtgatcctgatgctgttcctgttcggcggcccgattctggaaggcttctcgctgaccatgctgatcggtgtttccatcggtacggcttcctctatctacgtcgcctccgcgctggcgttgaagctgggcatgaagcgcgagcatctgatccagcagaaggttgagaaagaaggggcggatcagccgtctattctgccgtaatccggttcagttgagataaagctatcccggcccttgcggccgggatttttttgcccgcgacaaaacctgctgacagtatgctgtcaggagccctcccatacactgcctctgaactcactaacgagcaggaggaagtatgaacaacgtgattaactggtttgaaattccggtcgccgatatggatcgcgccgtcgcgttttatgagccggtgatgcaagtgtcgctgcgtcgcgaaaccatggactgcgccgagctggcggtgttcccgcatcaggatccggcccccggcggcgcgctggccaaatttgaaggtatcgcgccctcggcgcagggcgctattatttatctgcatactgatcatcttgccgccacgctggagcgcgttgcctcggcgggtggggcctgtgtcttcggcccgctgacgctgccgaatgatattggcaccatcgccctgtttaccgacagcgagggcaaccgcgtcggcctgcaccagccggcttaaccttaacttttgtgaagtgagacatgacccgacgcgccgaccgtttatttcagattgtgcagatcctgcgcggcaggcggctcactaccgccgcgctgctggcggagcggctgggcgtgtcggagcgtaccgtctatcgcgatattcgcgatctctccctctccggcgtaccggtggagggcgaagcgggcagcggctaccggctgctggcgggctacgatctgccgccgctgatgctgaccaccaaagaatccgaggcgctgatcgctgcgattcggctgctaaaaacctggggcggtgaggcgctgtcgcagtcgctggagtccgcccaggaaaaaatgctggcgatcctgccggaggcgcgtcggcgccaggcggagcagactcgcctgtttgcccctgaccttggcgcgcatcgctatgctaaaacccattttgacgttatccaccaggccgtatccaatcagcaggtattacagcttcactaccaggatgaatccggtcaggtgacgtggcgtgaagtgctgccgctggggctgtttttctggggggagcgctggctgctggtggcctggtgcgaactgcgcaatgattaccgcaattttcgcctcgaccgttgtctggaggtcagaaggaccgaacgtcgattcagcgagtgcgccgaccgctcgttaagcgattttctgcgcaaggtccggtgcgaggtgcgggagaaataaaaaagcccgggcagcaggagctgcggcccgggcgctgtcttgctgtatcagcaatcagaagttgtagccaaccacgaagtaaccaccccagccggtcgagcgaacgctgaacggaccatcgccgaagttcagcttcgcatcatcagcccactggccgccgttatggaagtaacgggcgacgatagagtagtgccagtgcgcgtagttcagcgccaggatgtggctggaggcgatagagttgctggtgcgcgcgtgcttcccgttcagatcgtagaagttgtcatcgccgaggtcagaaccccagtcgaagttggtgaagccgatgtagctcagcgaaccgccccacaggtcggtcagcggcacaaagtatttcactttgaagcgatagccgtcccattcgttttcgttggaggcgccgtagttctgccactggtacttggcgtagacgttcagcgacaggctcattggcaggccggtatcgatatcggtacccagacccatataccaggtgctctgctcctgggagtcgttgcggcccatatcgtagatatagttgttggcgaaataccattctttgaacggcccgaagctcaggtcggtattggtcagcttatcgatagagaaacgcggttcgatctccataaacagcggggaacctttgttccagataccttttgccgtgctgttgccgccgaagaataccggggcatcaatatagccgtagaaatcaaaccagtcttttttggcgaacgcttcgtattccaggtaggtatcgttacggatctgcggtccaaaacgggtgtggtagctgcccaccacgttaacactctggtgccaccagtcagacagatactgcggtttgtcgttttctgccgcgcccgcggcaaaagtagtggagagcgccacaaccgcacccgctgccagtaatgtttttttcatagtaatgccactgtttaaattgagcctgaaggcgttaaaagaagtgccgaagcgtttctaaatatttcgtctttctgtgggggtctattataggaatcattgctcacaaaaatacgtgttgtttcacataaccagaacatgcgtaatcgattgcgttcacgattctatgcatttcttgacaaaatgctactgaaaatcgcgctgcagaacgatttctaatgaactcttgcgaaaagttgtaagtggataagaacgacggggcaggacgtagccgggcggggctggcccggctgaaggcttactgggcggcggcgggctggatatcgtgtacgcgaataaaaccgactttatctggcgttacattgaggcgcaacgggatatcgacatcgctgggggcgagggtgctggccggcgcgctaatcagctgatcctgaacattgacttcctgatagctatgggtggtgccggtgatctgtccggaagcgacggtggcggtaaaggccggcagcggatcgttggattcgccctgaatgcgtaaggtcaggcgtgacccatcgccatccggggtaatactgcccaccgacatgcgcagggtgccgatctggctctccagccgcgccggggtcttggcctccggcagcagatagacgccgcgggtggatttggcgttcagcgcgttttgctgggtgattttgatcgtttgctggttgagctgggtcatctcctggctcagcgtactcacgctctggtgcatctggcggatttcgctttgctgggcgcaggcggtcagggtgaacaggcagcccgcgatggcgagcttcaggtaacgtcttgtcatggtcaggattccgtttacagaggatgcttaatggtagccaaaccggcctcatctcccatagatcctttgtctcaaaagctctttctttgtagtccggtcacttcgcggtaaactactcttcagtttaactacctgtcaggacgcgctatgcattgccctttctgtttcgccgtggataccaaagtgatcgactctcgtctggtgggggaaggctcttccgtgcgtcgccgtcggcagtgcctggtctgtaacgaacgctttaccaccttcgaagtggcggagctggtgatgccgcgggtggtgaagagtaacgatgtgcgcgaacccttcaacgaagacaagctgcgcagcgggatgctgaaagcgctggagaaacgtccggttagcgccgacgacgtggaaatggcggtcaaccatatcaagactcatctgcgcggcaccggcgagcgcgaagtggccagcaaaatgatcggcaacctggtgatggagcagctgaaaaagctggataaagtcgcctatattcgcttcgcgtcggtctatcgcagcttcgaagatattaaagaattcggcgaagagatcgcccgcttacaggactaagccatgcaggacgaaatgtacatggcgcgtgcgctgaagcttgccgcgcgcggtcgctttactacccatcctaaccctaacgtcggctgcgtcattgtgaaagacggtgagatcgtcggcgaggggtttcactatcgcgccggcgagccgcatgctgaagtgcacgccctgcgcatggctggcgaaaaggcgcgcggcgccaccgcctacgtcactcttgagccctgcagccaccatggccgtacgccgccatgctgcgatgcgctgattgccgccggcgtcagccgcgtggtcgccgcgatgcaggatccgaacccgcaggtggcggggcgcggtttgtatcgcctgcagcaggccggcattgaggtcagccatgggctgatgatgaacgaagcggaagcgctgaataagggctttctgaagcggatgcgcaccggttttccctgggtgcagctgaagctgggcgcctcgctggacggccgcacggcgatggccagcggcgaaagccagtggatcacctccccgcaggcgcgacgcgacgtgcagcgtctgcgcgcccagagccatgccatcctgaccagcagcgccaccgtgctggcggacgatccggcgctgaccgtgcgctggcaggagctgagcgccgatacccaggcgctttatcccgaagagaatttgcgccagccgctgcgcgtcgtcatcgacagccagaaccgcgtcacgcctgagcatcgtattgtgcagcaggcgggggaaacgctgtttgcccgcctgcgcgccgatgaacggcagtggccggaaagtgcccgcacgctgctggttccggagcataacggccatctcgatctggtgctgctgatgatgctgctcggcaaacagcagatcaacagcgtctgggttgaggcaggggctacgcttgccggggcgctgctgcaggcgggcctggtcgacgagcttatcgtctatattgcgcctaaactgttaggcaatgcggcgcgtggattatgcgcgctgccggggcttgaagagctgagccaggccccccattttaaattcaatgagatacgtcaggttggcccggatgtctgcctgcatttaaccactgcgtgaggctttcctgattattaggaagcagcgctcagaataatatgataaaatccgccccccttgcggggcacatgaacccgaaggaagagtatgaacattattgaagctaacgttgctaccccggacgctcgcgtcgccatcaccattgcgcgtttcaacaactttatcaatgacagcctgctggaaggcgcgattgacgccctgaaacgcattggtcaggtaaaagatgaaaacatcaccgtcgtttgggttccaggcgcgtatgagctgccgctggcggctggcgcactggcgaaaaccggtaaatatgacgcggtgatcgcgctggggacggtgattcgcggcggtaccgcccactttgaatatgtggcaggcggtgccagcaatggcctggcgcatgtcgctcaggacagcgaaatcccggtagcctttggtgttctgaccactgaaagtattgaacaagccattgagcgcgctggcaccaaagccggtaacaaaggtgcagaagctgcgctgaccgcgctggaaatgattaacgtattgaaagccatcaaggcctgatttttgtaaggggaattccgtgaaacctgctgctcgtcgccgcgcccgtgagtgtgccgttcaggcgctctactcctggcagttatcccacaacgacatcgctgatgtcgaataccagttcctggcggaacaggacgtaaaagatgttgatgttctgtatttccgcgaactgctgtccggagtggcgactaacagcgcgtacctcgacggcctgatgaagccctacctgtcccgccagctggaagagctgggccaggttgaaaaagcggtgctgcgtatcgcgctgtttgagctgtccaaacgtgatgacgtaccgtataaagttgccatcaatgaagctatcgaactggcgaaaaccttcggcgctgaagatagccacaagttcgttaacggcgtgctggacaaagcggctccggtaattcgtccccacaagaagtaaactgcaggccgggttttgcgagggtcgcctcgcagcccggccttatttattattttgctgaggcataacgtatggcatgcggcgaattctccctgattgcccgttattttgatcgcgttaaaagcgcccgccttgatgttgaaaccggcatcggcgatgactgcgcgctcctgcatattcccgagaaaaaaacgctggcaatcagcaccgacaccctggtggcgggcaatcacttcttacccgatatcgaccctgccgacctcgcctataaagcgctggcggtgaacctgagcgacctcgcggcgatgggcgcggaaccggcgtggctcacgctggcgctgaccttgccggaggtggatgaagtctggctggaagccttcagcgacagcctgtttgtccagctggactattacgatatgcaactgattggcggcgacactacccgtggcccgctctccatgacgctgggtatccacggctttgtgccgccgggacgcgccatgaaacgcgctggcgcgaagccgggggactggatctatgttaccggcactccgggagacagcgccgccggtctggcggtactgcagaatcgtctaacggtggatgaaccgtctgacgccgactacctgctggcccgtcatctgcggccgatgccgcgcgtgctgcagggccaggcgctgcgtgacctggcgacatcggctatcgatctctccgacggcctgatctccgatctgggccatattctcaaagccagcggctgcggcgcacgtatcgatctcgatgccatgccgtactccgatgcgatgctgcgccaggttgattctgagcaggcgctgcgctgggcgctcgccggcggggaagattacgagctgtgctttaccgtaccggagctgaaccgcggggcgctggacgtggctcttggccatcttggcgcgcgttttacctgtatcggacagattgcgccggagagcgaagggctgcagtttatccgcgacggtaagccggttgcgcttgatttaaagggatacgatcactttgcgtagtcgagacgaggcgcttagccgcctgagtatgcgtaatccgtggcatctgctggcgactggctttggcagcggcttaagcccggtggtgccggggacgatgggctcgctggcggcgatcccgttctggtatctgatgacctttctcccctggcagctttactcgctggtggtgatgatgagcatctgtatcggcgtctatctgtgccatcgcacggccaaagatatgggcacccatgaccacggcagcatcgtctgggacgagttcgtcgggatgtggatcaccctgatggcgctgccgaccatggactggcagtgggtggccgccggcttcgtgattttccgtatcttcgatatgtggaagccgtggccaattcgctggtttgatcgcaatatccacggcggaatggggattatggtcgacgacatcgtcgccggcgtgatctccgctggcgtgctgtacgtcattggccatcactggcccatcggtctgctttaaccgcctctccccggcaacgctacgctgccggggaaaccacgcctttcacttaaatcccaccaccggatgcggctgatacggcgcctccagcttgtcgatctgttccggggagagcgtcaaatccaccgcctgcagcagatcatcgagctgttcctgacgcgacgggccgataatcggcgcggcgacgccgggtttgcttaacagccaggcgagggcgacctgggcgcggctggcgtcgagttcttccgccacgtccgcgagcttcccggcgatctgcgcatcgttttcttcactggtgctgtacagcgatttgccgaactcatctgagaccagccgggcggtggtctcaccccaggggcgggttagcctgccgcgcgccagcggactccatgggatcaccgctacgccgttacgttggcacaggggcagcatctcattctcttcttcccggtaaatcaggttgtagtgatcctgcatggtgacgaagcgcgcccagccgttctgctgctggagcgccagcgcctgggcaaactgtcgggcatgcatggacgaggcgccgatatagcgcgctttgccggctttcaccacctcgtccagcgcttcgagcgtctcttcaatcggggtggtatagtcccagcggtggatctgcagcaggtcgacatagtccatcccgagacggcgcaggctgtcgtcgatggagcgcaggatctgcgcccgggaaagtccttccgccagatcgccgacctggtgatacaccttggtggcgacaaccacctcgtcgcggcgggcaaagtcgcgcagggcgcggccaacgatctcttcgctgctgccgtcggagtagctatttgcggtatcgaagaagttgatgccgccttcaatggcgtgctggataagcgggcggctgctctcttccggaagcgtccaggcgtgtctgccgcggtccggctcgccgaaggtcatgcagccgaggcagagtcgggaaacacgtaaggcagtatcaccgagggggatatagtgcatagtgcgctcctgctattcatcaagggtatcccttaagcatagcaggagcggaaggggcaattatgccagccagtcgcggattttggcttcaataccggcggcatcaaggccgaggtcggcgcggatctcttcctgagtgccctgaggaataaaataatccggcaggccaatattgagcaccggtaccgcccggcggtgggccatcagcacttcgttcacgccgctgccggcgccgcccatgatggcgttctcttccagcgtcaccagcgcgtcgtgctcgccggccagctggaggatcagcgcggtatccagcggcttcacaaagcgcatatccaccagggtggcgttgagtttgtccgctaccgccgcggcttccggcagcagggtgccaaagttgaggatcgctattttctcgccctgacgtttcaccacccctttgccgatcggcagcgatgccagcggctcgagcgtcgcgccggtgccgctaccgcgcggatagcgcaccgcgcaggggccgtcgctgtagtggtagccggtgtacagcatctggcgacattcattttcatcgctcggggtcattaccaccatatccggaatacagcgcaggaaggagagatcgaacgctccctgatgcgtctggccgtctgcgccgacgatcccggcgcggtcgatagcaaacagcaccggcagcttctggatagccacatcgtggatcacctgatcgtaggctcgctgcaggaaggtggagtagatcgccaccaccggcttgtagtcgccaatcgccagcccggcggcgaaggtgaccgcatgctgctcggcaatggcgacgtcaaagtaccgatcggggaatttcttcgaaaactccaccatccctgaaccttcgcgcatcgccggcgtgatcgccatcagcttgttgtctttggccgccgtttcacacagccagtcgccgaagattttcgagtaggaagggaggccgccgctgcttttgggcagtacgccgctggtatggtcgaattttggcaccgcatggaaggtgatcgggtctttctcggcgggctcatagccgcggccttttttggtcataatatgcaggaactgcgggcctttcaggtcgcgcatgttcttcagcgtgctgaccagaccgagcacgtcatggccatccaccgggccaatgtagttaaagcccagctcttcaaacagcgtgcccggcaccaccatccctttgatatgctcttcggtacgcttaagcagctctttaatcggcggcaccccggagaagacctttttgcccccttcgcgcagggtggagtagagcttaccggagagcagctgcgccagatgattgttcagcgcgccgacgttctcggaaatcgacatttcattgtcattcagcaccaccagcaggtcgggtttgatatccccggcgtggttcatcgcctcaaacgccatgccggcggtgatcgccccgtcgccaatgacgcacaccgcgcgccgctgcttatcctctttcgcggcggcgatagccaccccgatacccgcggaaatggaagtggaggagtgaccgacgctcagcacgtcatactcgctttcaccgcgccacgggaagggatgcaggccgcctttctgacgaatggtgccgattttgtcccggcgaccggtcagaattttatgcgggtaggcctgatggccgacgtcccagatcaggcgatcgaacggcgtgttatacacgtagtgcagcgccacggtcagttccaccgtgccgaggccagaggcaaagtgaccgctggaacggctgacgctgtccagtagatagcgccgcagctcatcacatagcttcggcaggctctcttttggcaacaggcgcaactcctgggtggaatctaccagcgccagggtcgggtatttggcaatatcaaaactcatcagagactcattttttgtttatttatcgcgctgaataatgtaattcgcgagcgcttccagtgccgaagtatccagagattgtgcggccagctcatctaacgaccggcgggcatcagcgatcaggtcgtgcgctttcttccgggcttgctcaagacccaggagggcgggataggtgcttttacccaattgctggtcggcaccctgacgtttgccaagggtcgcagtatcccctaccacgtcgagaatgtcatcctggacctggaaggcaagaccgatattttccgcatagcgatccagcgcgggcagggcagcgcggccgcgttcgccggcgctcagggctcccatccggacggcggcgcggatcagggcgcccgttttatggcgatggatacgctccagcgcctgtaaatcaacctgctgtccctcggcctgcagatccagcgcctggccgccgcacatgcccgccacgccgctggcctgcgccagttcggaaaccatcgccagccggtcccggtcaggaacgtcgaccatcggcgcatcactcagtatagagaacgccagcgtttgcagggcatctcccgcaagaattgcgttggcttcgccaaatttaatatggcaggtcggcaggccgcggcgcagatcgtcatcatccatcgccggcaaatcatcatgcatcagggagtaggcatgaatgcattcgaccgccgcggcaggagcatccagcgtggtacggcacacgccgaacatctcgccggtggcgtagacaaggaagggacgcaggcgtttaccgcctaacaatgcgccataatgcatcgcttccaccagcggagtgttctgaaagggctgcggggcgatgaaacggcgcagcgcttcgtttgcctgttccacacaggcctgcaattgttgcgggaaatccatttattcagcgtccggcgtaaaaggcgtggtcggggaatcttcactatccgccagcaggatctgcacgcgctgttcggccttctgcagctgactttgcccctggcgcgccagctgtacgccgcgctcaaattcgcttagcgcttcctctaacggcaaatcgccgctttccagacggttaacgatctgctccagttcgcccagagcagtttcaaagctggccggggcctcatttttctttggcatagtgaatgtagactcttgttatgtcgcgacggcaataccgggtatggtaacgaagtcacgcgtgtaagcaaataacgcgcaatggtgatatactccgcgcccaggatgcaggcaccggtgtgcgctgctttacaacttttgcttatagccccgtcgggcttgccaacgaactattgtcgctatgaagtttatcattaaattgttcccggaaatcaccatcaaaagccaatctgtgcggttgcgcttcattaaaatcttaaccgggaacattcgtaacgttctcaaaaactatgatgagacgctggccgtcgtccgtcattgggatcatatcgaagttcgcgcgaaagatgaaaatcaacgcccggctattcgcgatgcgctgacccgtatccccggcatccaccatattctggaagtcgaagacgtgccgttcacctcgctgcacgatattttcgagcagacgctgccgctgtggcgcgaggcgctggaaggcaaaaccttctgcgtgcgagtgaagcgtcgcggcaaacatgaattcacctcaattgaagtggaacgctacgtcggcggcggtctgaatcagcatattgaaacggcgcgcgtgaagctgaccgacccggacgtcactgtcaatctcgagattgaaaacgatcgcctgcttctggtgaaaggccgctatgaaggcatcggcggtttcccgatcggcacccaggaagatgtgctgtcgctgatctccggcggctttgactccggcgtctccagctacatgctgatgcgccgcggctgccgcgttcattactgcttctttaaccttggcggcgccgcccatgagattggcgtccgccaggttgcgcattatctgtggaaccgcttcggcagctcacaccgcgttcgctttgtggcgattaactttgagccagtagtcggcgaaatccttgaaaaagtggacgacggccagatgggcgtcgtgctcaagcgcatgatggtccgcgccgcgtcaaaagtcgcggaacgctatggcgtgcaggcgctggtcaccggcgaagcgctcggccaggtctccagtcagaccctcactaacctgcgcctgatcgataatgtctccgatactctgatcctgcgcccgctgatttcgcacgataaagagcacatcatcgacctggcgcgtgagatcggcacggaagatttcgcccgcaccatgccggaatattgcggcgtgatctccaagagtccgaccgtgaaggcggtgaaggcgaagattgaagcggaagaagaacacttcgatttcagcatccttgataaagtggttgaagaggcgagcaatatcgatatccgcgagatcgcccagcagacggaagagacggtggtggaagtggaaaccgtgaccggctttggcgccaatgacgcgatcctcgacattcgctccatcgacgagcaggaagacaagccgctgaaggtcgagggggttgaagttgtttccctgccgttctacaagctaagcaccaaatttggcgatctcgatcagagcaaaacctggctgctgtggtgcgagcgcggggtgatgagccgtctgcaggcgctttatttgcgcgagcagggcttcagcaacgtgaaagtttatcgcccgtaacagattgttatgatgcaaaaggccttccctgatggaaggcctttttactattggcaggggagtgtattagcgcagggtcagcgccaggtcattgagctgatcgatgacgatattccagccctcgaaaaatcccatctgctcatgctgctcgcgggtttcatcatcggcatgcagcaccgtagccgtatagcgacacccgacctgttcatcggcaaaggtgatgatggccgtcatcgcgaagggggaaacggcggggcgataatccgccgtcagcatcgaggtcatgacgattttttgttgcgggataacctcaagaaaacagccggggttatcgctgcgttcaccgtcaggcccgtgcatcacggtgtgaaaggccccgccggcgcgaaaatcaaaggccagaacctcggtttgctagggcttagggcaccaccaggttcggagtaatgccgggtcggcccacgcgcgccacagggcttgggcgggcgcgctgagcaggcggctgataacaagatcgcgagaatcggttgcgctccgggacatgctgcgactcctcaggaaaaggggtgccagcccgcggcgcggaccggctatcaggcttcgtagtaattatagatgccagcggccatcaccagctgtgaggcgacctcatacgctttctcgcgccccaccagcagatcgatcattttcagggcgaaatcaatcgaagtccccggaccctggctggttaacagattcacccgcggatcccagaccactcttttatcctgccactgctcggcggggatatgttccttcagcgccggaaaaccggtcatgttgccgatcgggaacagattatggggtaccagcacggtcgccggggcggcgcagatggcggccacaatgcgcccagagagatgaaactggcggacggtttccactagtagcgggctgtcgcggaagcactctgcgcccttgataccgcccgggaggacgatgatatcgaaatcaccatcggccacctcgaccagcggcgcatccgctagcagtttgacgccgcgcgaacagacgatggtcaggctgccgtcgctggcgacgctggcggtggtcacctttactccgccgcggaccagcaggtcgatagtggtgaccgcttcggtctcttcgctaccaggggcgaggcaaatcagtgccgacgcgctcatattcattctccttacgcttgatcaattcaaataagcgggcgttttccggtacggcgacgccgtgggcgcgggcgcggttgagcagaaaaccggtgatgtagtcgatctctgtatgccgctgggcgcgaacgtcctgcagcatggaagagatattttctgccgtactttcaattacctgttcgacataaaatagcaggttttccgccgaggtatgaataccttcgcgctccatcaccgccgccacctcgcgacaaatggccgcaacttcctgcgtatagtcgcgcagatcgccgtttttacaccctttgagcgcggtcagagggttaatcacgcagttaaccgccagcttgcgccagatggccgagtggatattgttatgccaggcgacatccggcagcacgctctgcagaacttctgcgagatagctgtagtccccctcgtagctttttgccggtccgatatgcgtggtgccctgggcaacgtggatgatgacattcccatcgcgccgcgccgcctgggtcgtggaggccagcagcaatggctgtttcacgccgcgcagctcctcgacggtgcccatgccgttatgaatcagcacaattggcgtggtgtccggcaggatcccggccaggtgctttaccgcattcgacacctgccaggcctttaaggtgacgatcagcagctcgctgctggcgagaaaatcggggtcgttggccgtcagcgattcgttgaacactgagccatcggtttcaatgacgttgacgctacagaatggctgcggtacgcgcagccagccctggacttcatgtccctgtttgtacaacgcggtcagccatagttgtcccagcgcaccgcatcccagtacggttactttcattgttcctcctcatctgccgctatcccaggcgctgatggctaaagtctatctcgtcgcttttcgcatcgtcggacatcacggggaaaatagcgcgagcgttgcgtaatcagctaagcttccgggataacaagttgagttatgccgcgttgcaggtattatgcaacgcaaaagaaacggaaggagaggaaaagatgccatctttcgatattgtctctgaagttgatcttcaggaagcccgtaacgcggtggacaacgcgagccgcgaagtcgagtcgcgttttgattttcgtggcgttgaagccacttttgaattaaacgacgccaacaagaccattaaagtgctgagcgagtctgacttccaggtgaaccagctgctggatatcctgcgcgccaagctgctcaagcgcggcattgaaggcacctccctcgacgtaccggaagatatcgtgcacagcggtaaaacctggtttgttgaagcgaagctgaagcagggcattgaaagcgcggtgcagaagaagatcgttaaactgatcaaagacagcaagctgaaagtgcaggcccagattcagggcgaagagatccgcgtgaccggtaagtcccgcgacgatctgcagtcggtgatggcgctggtgcgcggtggcgatctgggacagccgttccagttcaaaaacttccgcgactaaggcggcgggcagacagcaaaaagcggggaattccccgctttttttatacccctttgatgagctgctctatctcgaagcggttggtgaccttgctgtcgattttgatatacaccgaacgctcctcgggtaccaccagcgcctgatgaaccccgctggcgctcagcagacgcgcctgcagcgcgctgtcgaccaccacgccgtccggcacctccacccgcaggctgctgacgtacggcggctcgctcatggtgctggccaccagcagccacagcatcgccagcagggcgcccagcagaaacacggtttgcgaatcaaagaaaccatcgacccagccgccaagcgcgccgccaatcgccacgccgagaaactggctggtggagtagacgcccatcgcggtgcctttgtagcccgccggagactccttgctaattagcgacggcagcagcgcttccagcaggttaaacgccaggaagaagagctgaacgcccgccaccagctcccagaagtagcctccggcgccccagaggacaatttccgcaatcagcaggatggcgacgcagagcaggaagacgcgcttcatcttgcgcttcacttcggcgtagatgataaacggcaccaccgagatgaacgagataaccatggtgaccaggtaaatcttccagtgctcggcggccgggaagccggcggcctccagttgtccgggcagggcgacaaaagtggacatcagcataatgtgcaggcacatgatgccaaagttaagcttcagcaggcgcggctccgccagcaccttgctaaagcagcccttcaccatcccggattcgcggttaaggacatggttatggctgttgggcaccacccacagggtgagcaggatgccgacggtcgccaggatggcgatcatccagaacagcgcgtgcagacccagctggtgggtgacaatcggccccagcaccatagcgatggcgaaggtgacgccgaagctgacgccgataaaggccatcgctttggtgcggttctgttcgcgggtgagatcggacagcagggccataaccgcggcggcgatggcgccggagccctgcagggcgcggccaagaatgatgccccagatggagtcggtgagcgcggcgatgacgctgccgagcacgaagataagcaggccgccgacgatcaatggcttacggccaatacggtcagataacagtccgaaggggatctggaacaccgcctgcgccaggccgtagataccgatcgccaggccaatcagcgcttcactggcaccctgcaacgccatgccatacgtggtcagaaccggcaggaccataaacatgccaagcatgcgcagggagaatacagtccccaaaccccaggtcgcgcgcagttcccctggcgtcattttgttatcgttcattaccacctcaatataaaaactgcgcctagtgtagcggcggggggtaagaagcgtaaataaatgtttgtttaacagatattacggggctgttgcgcgatgcgacaagttggtaaaaatcaataaaccagtggagggggactccactggcgagggggaaaattaaggtaaagtaaagtcaacccactggctgccagcgtcagccgatttgacgcactgctctacccaatagacgccgtgcagcccggcttcgacgtccggataccagaagtcttgcaggaaggcgcgatcgtcgcggtccgtggcgtcaatcgcctgcgcatagcggcgatagaggttggcccaggcttcgaacagcccttccggatggccgccgccaatgcggtcatccgccagcgcgttcggcgacaggtagggcattccacgttccagaatgcgcgccggctcgccctgcacctcatagctgagctggttaggatgctcatcccaccattcgatgcttgctttttcgccgacgatgcgcactttttgcgagtgcatggcgccgctgttgaccgcgctggtccacatggatccaaccgcgccgttgtcatattccatcaggacaaaggcgttatcttccagcggcgcgcgggaggaaacaaagctctgacgggagcacatcagccgtttgatattgagctgcggcgccatggtctcggcgacaaacagcggatgggtggccagatccccaagcacatagctgggcccggcaaacttcggcgttactcgccagcgggtggattctgcctgcagctcgacggcctggttatggaagccgtgggcgaattgcatgttaacgatgcggatctcgccgagcagtccatcggcaatcatctgccgcgcctgctggatcatctgatagccggcatagccgtaggtgacgccgacgattttgttctgttttttgctcagatccaccagctcgcgcgcctcttcggcggtaaagcagaggggcttttcgcagataacgtggagtcccgcctccagcgccgctttggtaatggcgaaatgggtattgttcggggtggtgaccgagacgacctcgatcccgtcagggcgctgcgcctcttcgcgaaacagggtctggtagtcggcgtagcagcgctccggcgcgatgcccagttgctcaccgaacgcgcgcccgcgctcggcatcgacgtcaagcgcgccggccagcagggtataaacattgtcacgcagcgccgcacagcggtggctgtagccgatctgactggttcccccgccgccgaccatgccccagcgcagggaacgggataagggtttcaggccgtttaacatggtgctctcctttttgaaatcatttgcactctgaggcgctcaatgccgacgcctgcggcaacgcgcatccggatagactgacttcaacttaaggaaatgtttgttctgtttcaattgtgttgtggaatttattatccatatatgcgagggggatcgaattagcgatagtttcttttgcgcttggttgaaaaggtgagggcgggatatcgcctgccggagtcgtccagattgttgcgggcgttttttcgtttcaacaaaatatgaaataaattttctttattagctgctgaaggcggtgcaatccgccgattgcaccggggaccagatgccgctatgacgctccgcgcacagacgcgggggaagttgaagcgacgggaggatgaccggccgcaaagatgcccttcgccgccaggcctgcgacggtgagggctgccgggataccgaggatcaaaaagacgctttcaaagggcaggttgagcgccatcatctcggcgccggcaaaggcgctgagaatggcgccgatgcgcccgacgccgtgcatccagctggatcccgtcgcccgcgcctgtgtagggtagtagcgggcggagagggcgttcatgccggtattcgcgccgttcaggcaggcgccgctgataaacgccagcatacagagcaaggcaaagctgcccgcggcgtagcccatcgccatggtgaacaggccgccaacggcgtagattatacccagcgcgcgatgggggttgatcctgtccatcagccagccggcaaacaacgagccgagggtgccgcccgcctggtagatcgccgtcatgatggccgcctggctaacggtcattcctaccgctttaaccagcgttggcagccagctgccgaggatatagaccaggaacagccccataaagtagaccagccatagcatcagcgagccgaaaccgtactggcgggagaggacaatgcgcatcgcgttgccggccgccggctgcgccggcaggataaacctcacgttgtcgctgatttgtccgggatagagacggttaagaatggcgcgtatgcgcgccgcgggcgcttgtttgatcaccagaaaacgaaccgattccggcagcagccagatgagcaggggggcaaacagcagcggcagaataccgccgagcgccatcagcgagtgccagccaaactgggggatcagccacgatgccgaaaatcctcccgccgccgcgccgaaggtgaagccgcaaaagatgacggtgataataaatgaacgctggcgttccggggcgtattccgacaccagcgtcccgatattcggcatcgcggcgcccagcccgaggccagtcataaagcgaaagaacatcatctgttctacgttgtgcgagaaggcggtggcgatggtccagaaaccgaagaagaaaacgctgttgatgatgattttcttacgtcccagccagtcggcgagcgggccggagaaaatcgcccccagcgcgaggccgatcagcgcggcgctgatcaccagacccagctggtggttgcttaccccccattccagctttagcgtcggggcgataaagcccatgatcgcgatatcaaaaccatcgagagcgatgacgcaaaagccgagaaatataatcagcttctgaaatcggctcagcgggttacgatttattaactctctgacatccaggcgttgagtctgtgtcatagcgtattccttatgcgcaggcgcgcaggtagggctgcgcggcatcaaacagtaactgcgcccgctgaagaggcggcagggcgccttgctcgccgtcaagcggcacttcgagagagaccggcagcgtcgccggcagggccgacatcagaccatgcagatccagaccgccttcccccggcacgttgcgcgccgagcgggcctggcggataagttcctgctcgctctccggcctctgcgccgcgccatcgcagagttgcatatagttgagatgatgcgcgggcaggctggagagggcggcgagcgattctcccgcgcgccagaaatggagagcgtccaccagaatgccgatgtcttcccgcccgctggcggcgattagtgcttgcgctgcggcgatgttgcgcaactgagtccagggcatcggctcaagattcatggtcagcccaaatggacgaccggccgcggcgaggatggcgaggttgtcagcgctgcgctgaaggttgtcatcattgccggcgactaacacctgtccggcgccaagacgcgcggcggtctccataaaacgctgcagccgatcgtcgagggtaaacccgggggtcaggcggacgatctccacgtccgacacgcggatgccagtttccatcaacgcggcgagcgtcgcccggacggccggggtatcgcccagcatgtcgtagtccgggtcggtcggtgtggcggggagcagtcgcagcccaacgtgggtaaaaccggttctggccgcaatccgcacctgttcgggggagggacatcgagcagggtcagcgcggcgagcgatagggtacgcttgttcataaagggctccggtacagttgcaggtgaagagagttagggtgcatccattcgtggaaatcaagttatgttattgtttatatttgttttttttgccaggtttttacccaccagatagccgaaggtcatggcgggcccgagggtgatccctccgctggggtaatagccgcgcatcacgctcgacatgtcgttgccgatggcgtacagacccggtatcggctgctgctgttcatccagcacccgggcgtgttcgtcggtttgcaatccgctgaaggtgcccagcgagccgggcagaatgcgcaccgcgtagaacggcccttcgcgcagcggtccgagcgtcacctgatggtcaccctgggcgcggttataggctgatgccccgcggtgaaaatcgacgtcttcgccagcgctggcgaagtggttaaagcgttcaacggtttccgccagcgcattggcgtcgatagcgcactgcttcgccagctccgccagggtgtttcctcgctgcagatagccggtacgcagccaggcggtgggagtgaacgggaacggtctggcgtggcccaggccgtagcgacgcagcgcgcgacgatcggccagcagccaggcctgcggcgtgtcgcccgcgggtgtggccgccagcagggcggcgataaagtcatgataagagtcggcctcgttaacaaaacgtttgccgttgggcaggacggcgatcaccccgggtttggcgcgctccaccagatgaggaaacattagctgctggccgctggccagagtgacgcgggacaccggcgcccaggccagcgggtggcgcagggaagtgtcgaactggccgccgacggattcgccaagcctgatcccctcgccctgattgtccggcggtgcggcggagaaatggccgtaaccctccgccgcgtggggcaccacctgcgccagccgctggcgatcgtggggaaaaccgccgcaggccagcaccacggcgccagcttcgacgtgaatctccccgccgtcgctgcgcaacaccgcgccggacacgcccggcggaccctgcagcagccggaccaccggggcattgagctgaaaacgcacgccggcgtcgagggcggatcgcagcagacgggcgaccagcgcattgccattgaccagatgctgcccccgtccggcgcgtagccgctgccagccgtggcgcagcaggcggcgggcagcatacagcgcggagcgcggcgagcgggtggcattgaaaaaatgcgccatatccgcgccgccggcgatgcccatcccgcccaggctaatggtttccagtggcggacgcaggcgatggagccagtcgccgagcaggcggccatcgtagggttgcgcggtgaccgaccgcccaccgttcgccgcacccggcgacgggtgaaagtccggcatggcgctgcccgagagaaactgcaccgccgtccgctgatggaaaaattccaccatctccggcccgtaacgcaggaaggtttgcagacgaatatcggcggcttcgccccccatctcatgctgcagataggtcagcggcgcgtcggctgcttcgtcgatgccctccgcccgcgccagcgggttgcgggggatccacagccagccgccggaccaggcgctggttccgccgagcactgacgctttctccgccaccatgacgctggcgccgtgcatcgccgcagtcaccgcggcagagagccccgcggcgccggagccgaccaccagcacatccaccttcacaggcccgctcatgttggactccttactgcagaggtgaaaaagcggtggggcgcatcagcaccgactcgaggcgttccacggcggccagttcgcgatttttacgcgagaaggtctgccagcgttcgtcctgggccatccgcgcgcggcgcaccagacgatcgtccaggctttcataagcccagatgtgcactacctgattgaccacgccgatctcggtaaaaaagaagccgattagctggccgagatggtcggtttgcaccgccagggcatcgctttggtacagcgccagccagtcggccattttcagcggattgatggtgtacgtgcgtttttcgtagatcatgatgttttcctgattagtgggtggagtgttgtgccagatggcaggcggcgagatagccaaacgtcagccccgggccgagggtgatgccggggcccggataggtgccggccatcagcgaatccatgtcgtttcccaccgcgtacagccccgggatggggtgtccttcggtattgacgacctgggcatcggcggtggtgaccaggccgcgtgaggtccccagatcgccggtataaagtttgatggcatagaacggcgcgctgagcaggggggcattacaggcgtcaggctgatggcccggatcgcccatcgcccggttatagctgttgccgcctttagcaaattcccgatccacgccctgcgcggcgtcgcggttgtagcgggctaccgttttgctcagggtttgggcatccagaccaagctgttgcgccagcgcggccagggtatcggctttgtgcagatagccagcggcgaccagggcgtcattattgaccggcgccgggcgcgccagtccgaggccataacgcttcatcgcctgggcgtcgcagagtaaaaaacagggggcattttccgctgcatcctgcattgcgctggcgaaatggtgataggaactggactcgttgacgaagcgtaccgcccgctgattgacggcaatcacgcccggttttgcgcgatcggttaccagatgggggaagcgctcctcgctgccgtcggcccgggtcagcaccgataccggcgcccagaaaaagttggaggcccgatcggctccctcgcgagcgttaagcgccgccgcgagatgcagcgcggcgccatcgttggccggcggcgacatggtgaaatgctcgcgggtatgtggccgatagcgcgccgccagcgcgcccgcggcgaagccgcctgcggccagcaccaccccgcgccgggcgtgcagcgtctctttttgcccctgatactcaatctccaccccgcggaccgcgccttgcgcttcgcacagcgtcagaacattgacattcagccgcaggctcatgcctttacgcagcgccgtagtcgccatgcgggcaatcagcgcattgcccatcgccaggcgggtgccgcgagggtacttcacccggtcgcgggcatagcgcagcagcagtcgggtgcaatgggccagggagcgcagcgagcggcgcatgtcgagaaaatgttgaatatcgacgcggttgaccatcatcccgccaaacagcagcatccccggcggcggtgaacgcaggtcgcgaaacgcgtcccccagttcacggccgtcatactccaccacctccagcgcacgacctacgtcgactgcgccgggttcatccggatagtaatcgggcgagagcggacgcaggctgtactttactgccccctcacgctcgagaaaggccagcgcttcccgcccggcgctgacaaacgcttcggcaagatcttcgcggtactggccctcgccgataatggttcgcaggtaggttttcatcgcctcggcgctaccgcttttgccctcggcgcgcgcctggtcggtatcgtgcagccacacggcgccgccggagatggccgaggtgccgccgaactggtcggctttctccagcatcagcaccgacagccctttacagcaggcggtgaccgcggcggcaaaaccggccgcgccgctgccgatgacgatcacatcccagctcttcatgccgccgctccctgagcctgcgggatggcgccgataaactggcccatcagcctcatctgcgccagcgccatttccggcccggtctgtactttgcaaccacgggcggcggcgaaagtgagcaacggcgtcatcaccggggcggtgacaacgtcggccacatgagtggtgctgtcgagcgtatccagaagcgcctgcggtagaggcagctcatcaaatccggccatgccggccggtgagccattaaccagtagatcgaggccgtaaagggtgtctggcagcgcgctcagttgcaccgccggaaaggcctcagccagaaggtcatgcaggcgctgccgggtggccggggtttgatcgtgcagggccagccgacggatccccgcctcgcacagtccccaggcgatggcgctgccgacgccgccgcaaccggagagcagcgcctgcttacctgccggctgaaaaccctgcgcctcggcggcgagctgaaagccgacgccgtccagcatatcgccctgcaggcggccatccgccagcttgcggatcacattgacggcgttgagtcggcgggcgcgcggcgtgaggtcgtcgaccagcgcggcggcgcgttgtttatgcggcaccgtcaccagcacgccggtcatgttctgccagccgcgcagggcgttgaggtaggcggccaccgcgtccgggacgatatccaccgggatcatgacgctgtccatgtgctgttcggcaaagtagcggttgaagttatccggtgatttcacctgggcgatcggatgaccaatcacggcgacaacctgggtagttccactgaccatttcaaacctcatttgttaaatgaatgttgtgaaagtatttcagtggaagctgggagcgacaacgcagaattcggacatgttggttgttaatcgcaccatcgctgcgataatcgcaggaaatcgataatgatgttgcaaaaatgtgagcgaatatgcaaaacaccattcatccacgcgatctgatcgtcggtttacaaaaagggctggcgctaattcagcttttttccaaaacctgcccaaagctcaccgtcgcccagacggcgaaaatgagcggcctgacgcaaagcgccgcgcgacgttttctgctgacgctcctgcatgagcgctatctgcaaaccgacgggcgctattactggcttaccccaaagacgctgcggcttggccaggcctatgtcgattcggcgcagtttcctcgcatggtacggccgattgtcgaatacatcgccagccggaccgaagagcacgcctcggtgggggtggtggatgaagatgaactggtctatatcgcccgcagtcggcatacgccgttcaactctacgtcggtgcggcttggggagcgggtgcccattttctgtaccgccggggggcgattgtggctggcttcgctgccggaagcagagtgtgagaccgtcctgcagcgcataacccgggaacaacgtaccccctatacggtgaccgatattgcgtcgctgatggagaaaatcgcccaggtacggcgccagggatacgccaccattgagcaggagtttgagattggcatgctggtgctggcggtgccgttaaccgacagggaagggacctggtggggggcgctgagtctgaccagtcatcaatcgcgcacttcgctggaagcgttatgccgcgatcacctcgatctgctctacagcgcgcaggcgatgctggtgggttaaacagggcagccagtggcgctgccctaagatagacgtcgcttaggccgacgctttggtcagaaaggtgttccagtcgctggccgcgttattcacgaaagtattccagctgttgccggcggtgttaacaaagcttccccagttttcctttccggcggtcacaaaggtttcccagtttgactgtccggtcaggaaggaaccaaacgccatcgcgctgtcgccgacgaaggaggcaaatgcggtgccggaggtcagaacaaaagaggtgaagccgacgccagagttggcgacaaagctggcgaagccgctggctgcgccgaacagattaaagccaccggagatatactccatttcgttcagtgttaactctttcattgcaattccttgtagtgattatttcccaaaggggcaagagccccggcgaaaggtagcatcgcaggaccgtgcggcgcgagtgatgcccggtgtgtgctggctcaatttttcctcattttttgatatgaaagatagcgggaaagcgtcggaagaggggagggaagtatgaaatgagaaagaaagcgatgatgaaacaggaaagaaaaagccccgtaaatacggggctttagatcgtacgggagtgcgtaattatctcacgtaagccagcagactatgtgaatccggcaccataaagtcaacggacatcatcacggacagcgcggtgatggcgacgatagaaaagacgaacagcttacgcgcccagactttatcatcggccactttatagccacgcagcgccatgcccagccaccagacgctgaccgctgccgccacgaccaggtatttatacccggcgtagccgcccagcgagagcatcagggttgccacggcaaaggcgacgatgtacagcgtaatatggtttttggcgaccgaaatgcctttcaccaccggcagcaccggaatattcgccgcctgataatccttaaagcggaaaatcgcgatggcgtaggagtgaggcatctgccacaggctaaagatagccagtaggatcgccgcaccgctgtcgaaatcaccggtgaccgcgcagtagccaatcaccggcggcgcagcgccggagagtgagccaatcagcgtgccgtagacggagtggcgtttcatgtacaggctgtagacgccgacataaaccacgaaccccatcacccccagccagcaggccagcgggttagcgccgaaccacagcagcatgaagccagcaatacccagcaaggtggcgtacaccagcgaagcttctggcgagatcagccctttgaccagcacccggtttttcgtccgttccatcttacgatcgatgtcccggtcgatgtagttgttgaatacacaacccgaggcgaccaccagggatactccaaggagcgtccagacgaacagcggatagtcgatgtggcctttggaggccagcaggaaaccgccgatcacggagatcaggttgccaaaaataatgcctggtttcgttacttgcaggtattgcttaaacatactcgccgctcttagtgcatcatcatgttgtagttcaggttccacataatccagatggagccgacaaccacgatcgcaatgatgattacggtgaagataaatgcggtcaggttccaaccttcatcggacttgctgttcatatgcaggaagtacacgaggtgtaccacgatctgcaccacagcggtcaccagaatggtgccaaggataaccgcatgcgaggcggagccactcatcaccatggcgaacggaatgaccgtcaggatgatggacaggataaatcctgtcatgtagctcttcacgctgccgtgagaagcgccgctatgatcggtagaatgactcattacatcgcccccatcagatagacaaccgagaacacgcagatccacacgacgtccaggaagtgccagaacaggctcaggcacaggatacgcgtgcggttagtgctggtcaggccacgacgtgaaacctggaacatcagcaccgccatccagataagaccggaggtcacgtgcagaccgtgggtgccgaccagcgcgaagaacgcggacaggaagccactacgatccggaccaaagccttccatgatcaggtgatggaattcatagatttccatcccgatgaatccggcgccaaacaaccaggtcaacgccagccaggaaaccacctggcttttgttgtttttgtacatggcgatagccgccatgccgtaggtgatggagctgaacagcagcagtgcggtttcaaccagaacgaacggcagttcgaaaatatctttgcccgtcggtccgccggccgtgccgttcaccagaacggcataggtagcaaacagcgtagcgaagataatgcagtcgctcatcaggtagatccagaaaccgaataccttcatcggtcctgtatcatggtgcccgtgttcatgcgcgtgggcagtatgcgcaagagtatcagttgccatttttcagccctgctttgttaatctcatcgaaatgctgtttttccagtttttcgacttctgcaaccggtacgtagtaatccacgtcctcgtcaaagctcttaataatccaggtcgctacgatgccgatgaagctggcgatcgccatccaccagatatgccagatcatggcgaaaccaaataccgtagcgaaggcggcaatcacgatgccggcgccgctgtttttcggcatatgaatttcttcatagtgagcaggctgtttgtacgcttcacctttctctttcatttcccagaaggcatcacgttcgtgaacctgaggaacgatagcgaagttgtagaacggcggtggagaagaggttgcccactccagcgtacggccaccccacgggtcaccggtcaggtcgcggttctgatcgcggtcgcgaatagacacgtagaactgaatcagctggcacagaataccgcaggcgatcagcgccgcaccgcaagctgcaataaccagcatcgggtggaactgcggatcgatctgctggctcagacgacgggtcatacccatgaagcccagcacgtacagcggcataaacgccacgaagaagccgatgatccagaaccagaaagcgcgtttgccccaggtttcgttcagggtaaagccaaaggctttcggccaccagtaggtcagacctgcgaagcaaccgaacactacgccgccgatgataacgttatggaagtgcgcaatcaggaacaggctgttgtgcagaacgaagtccgcgcccggtaccgccagcagcacgccggtcatcccacctacggagaaggtcacgataaagccgatagtccacatcatcgccgagttgaagacgatgcgaccctgatacatggtgaacagccagttgaagatcttaaccccggtcgggatcgcgataatcatggtagtaataccgaagaaggcgtttacgttcgcgccagcacccatggtgaagaagtggtgcagccaaacgatgaacgacagaacggtaatacagacggttgcccataccagagaggtgtaaccgaacagacgcttacgcgagaaggtcgcggcgatttcggagaagaccccgaacaccggcagaaccaggatgtacacttccgggtgaccccaggcccaaatcaggttgatgtacatcatcatgttgccacccatatcgttggtaaagaaatgggtgcccaggtaacgatccagggtcagcagcgcgatggtgacggtcagaattgggaacgaggcgataatcaggatgttagcgcacagagatgcccaggagaataccggcatcttgaacatggtcatgcccggggcgcgcatcttgataatggtcacgaagaagttaataccggtcagggtagtaccgataccggagagctgcagcgcccaaatccagtaatcaacccctacgccaggactgtactcaattcccgacagcggcggataggccagccaaccggtctgcgcgaactcaccaacgcccagagacaggttaaccagaatcacgcccacaacggtgaaccagaagctcaggttgttgaggaacgggaaggctacgtcgcgcgcgccgagctgaagcggaaccaccaggttcatcagaccgataacaaacggcatcgccacgaagaagatcatgataacgccgtgggcggtaaagatctgatcgtagtgatgaggcggcaggaagccggcttccccggccgaagccagcacctgctggctacgcatcatgatggcgtcagcaaagccacgcagcagcatgacgattgccacgataacgtacatgataccgagacgtttgtggtcgacagaagtcagccactcgttccataggtaggaccacttaccgaagtaagtgatggctgccagaagcgccagtcccccaatgataatcgcagccaccgttaccacgataataggttcgtggtagggcactgcatccagtgtaagttttccgaacatcgttttcttcctcggccccttagtgagcggtttccgcgtggctcatgtccatgccttccatcccgtcgtgagcagcgtgctcgccttcaggtttagacatgttcatgctctcgtgagacatgaatttgttcacaacatctttgaacagatccggtttcacgttagagaaatattccactttgttgtattcgctaggcacagccactttctcgaacgcggccatggagtccatggagttcggagactgtttcgcttttgcaacccactgatcgaaagtcgcccgatccggggtggcaatcgctttgaacttcatacctgagaagcccgggccactgtagctagcggagataccgtcataagtaccagcttcgtcagcaatgaggtgcagctgagtctgcataccggccattgcataaatctggctacctaagcgcggaataaagaacgagttcatcaccgagttagaggtcactttgaagtgtaccggtacgttcgccgggaaggcgatttcgttaacggtagcaataccctgttccggatagataaagaaccatttccagtccatcgatacgacttcgatggtgattggcttctcgtcatggacaagcggtttgcttggctccagtgcgtgagtggttttccaggtcagaacggccaggaacaggatgatcagaataggtaccgtccagaccacagcttccactttgttggagtgtgaccagttcgggctatacttcgcatctttattgctcgcgcgatacttccaggcaaatcctactgccatcaagacggcgggaataacgacaatcatcatcaggccgaaggccgtcagaatcaaagagcgttgctccagtccaatctgtccttttgggtcaaggagtgcagaatcacaaccactgagtaatacagtacctgcgattaatgacatccatcccaaacttttattgtatttcctgagtctcattgaacgacctcaattccacgggatctggtggcgtttaaagtgtatgggcattttacggtaaggttgcattactgtaaacatgattggatctctgtcagttctgtgttagcggcttctgcttggtttgtcacatatgtaacgtagtgttacttaatcgcttgcaaagcctgattttcgcgggattgataacgaaagggataagaaaaggagtgcttagcggctaatgggcataaccacccataaattagaacaattgtttaacatttaattatcaaataaaagacattgtgaaaacgaaaaataaaattcccggagctgaatcggttaaattatttaaagaatcgaacgaaaactgtcaataatttccagaaatcaaaaacgcacaaaacaacaaatagcgcggcggacaatataaaagcgttaataagccgttataattacgtttcgtaattacaacggctaataatgatgctggatccttaaatcaggcgggttttacgcagcgccagatagtcaagcaggccgccgaacaaaatcccgccgacggcggtgagcgcggcaacctccagcaggccggacaggaaggagaacgacgtataatccagcgcgttgaggatcagcagcgccagccacaccgcgagcagcaggcagcccagagtcaggatccccagcgccagcgcataggcctgcgggaactcactacgcggcataaagcttgcggtacgttgggtatgctcaagcgtttgccggcacagcagcaatagggcaatccccggcaccgccgcaacgacagagaagagatagaaggtcgaccagccgtgagcctcgacaaaccagccggcaatcggcccaacgtatacgcgaccgaccgcagagagcgccgagagcagcgcgaactgggtggcggagaacgacttattacatagcgtcatcagcagcgcgacaaatgccgccgtccccattcccccgcacaggttttcaaagaataccgcggtcgccatggaatagaggtgcttatcggtaatcgacagcagccagtagccggcgttagagaccccctgcagcaaaccgaaaatgagcagtgcccgaaacagcgtcagccgctgcatcaggacgccgccgtacagggcgccgagaatggtggcaaacaggcctaaggttttgttcaccattcccacttcgccagcgtcaaatcccacgccgcggatcaggaaggtggtggtcaggctcatggcaaacgcatcgccaagcttataaaggacgatgagcagcagaatcagccaggcgttgttgcggccgaaaaaatcgcgcagcggttcggctaccgcctgctcgagcgatctgggaaccgggataacgtcgctcggttcgggcgctagcagcgtggcgataatgcagggcaccagcagcgccgccatcagccagtacatcccctgccagccgagatagcggtcggcaagccacagggccagtccaccggagaccagcatccccaggcgatagcccagcacgctgatcgcggcgccggcgccacgctcttctgctggcaacacgtcggttttccaggcgtcgaacacaatatcctgcgacgccgagcagaaggcgatcaccaccgccagcgccgccatccagcgtaattgggtgaccggctcaagaaagcccatcgccgcgatcgccagcaggagtaatacctgggtggtcaacagccaaccgcgacgacgcccaagaaacggcggcgtgtagcggtccatcagcggggaccagaggaatttaaagacataggcctggccgacgagcgagaaaaaaccgatcgttttcagatcgatattttccaccgtcatccaggcctgcagggtaccggaggtgagagccagcggcagaccggaggcgaagccaaggatcagcaaaatggctgatttcggctgctgaaaaatgcgtaagtaatgactggacatagcataaagcacgaacccggcggaggccgggttcgcgatagcattaacgcgcgttttgcttgatgaaatcgtggatgctggtgtcctgcgccatatcggcgatggtatcggtcaggacgctgttgacggcatcagcgatgtttttgttcgaggcctggaaggcgccttcaacggagtagctggcgcggtagtttttggtcattttcgtgccgtttgccgcggtggcgatgatggcgatatcggctttggtggcgatgttatagcgcacgttaccctgagagacgtcagcatagagtttgttgacgatgatctgcagatcgaccgcgccgttcgggccaatcatgtagccgcgagacgtcatctgtttctccagcacttcctgcagcaggaagcgcagatcgcgggaggcggtgagagtgaccagctgattatcacgcgtcactttcgccagcgcctggtccggacgctgatcggcgccgttgatactgacggtcacgcccatcaggcttggatcctgctgcggcagcgtgattttcggcgatacttcaatggtggtcggcggcgtggcgcatcctgccagcataaacatggcgaccaacgggaaaagaatcttcttaagcatgttcaggtctcaacgcatggtgttgttataaggaaaattaccgccatcatagcattgccaacggcaaggggaagtggcaacgcgtgtaaatccatcgtgctggcggttttctgagcgtcccgccacggttaatggctcgttccccgacggatctggcgaccagagccagtaaacgtgatacttttgaatgaaaatatcagaacaatgctaattttttgttgttttctcctaatggaagcggtaaaagcggctaacatttaaatggagtggcggcatctcagcgttgtcggaggagaaaattcatgatgatacgtgaacagatcgaagcaaaacttagagcagcgttcgacccgatgtatctcgaagtcgtggatgaaagttatcgtcacaacgtccctgcgggctctgaaagtcattttaaagtggtgttagtgagcgatcgcttcactggcgagcgtttcctcaatcgccaccgtatgatctacggcacgctaaccgaggagctgtcgaatacggtgcatgccctggcgctgcacacctacacgattaaagaatgggaagcattacaggatacggtatttgcttcgccgccgtgccgcggcgcagggagtatcgcttagaaatcccatttgcaaccgctggcgcttttccagtatgttgcttgcagatttagcaaaaacggcctacgggccgttttgttttgcctggaaaatgcgcaaagtcagcgcttttgcgggcaaatttgagcgggaaatgtgaaaaatgccgcagcaccaggcgacaaccgttctcgactcacaaaagtgatgccgctataatgccgcgtcttatatatgaatgtcttcgggatgattctgacgacagggaatgtgtttctgatttgaagagggcatcccggttctgcgaagccacctacacgcgcttccagagttgaccgagcactgtgatttttttgaggtaacaagatgcaagtttcagttgaaaccactcagggccttgggcgccgtgtaacgattactatcgccgctgacagcatcgagaatgctgtcaaaagcgagctggtcaacgtagcgaaaaaagttcgcattgacggcttccgtaaaggcaaagtgccgatgaatattgttgctcagcgctatggcgcttccgttcgccaggacgtgctgggcgacctgatgagccgtcatttcgttgacgcgatcatcaaagaaaaaatcaatccggccggcgcgccgaactacgttccgggcgaatacaaactgggcgaagacttcacctacgcggtagagttcgaagtgtatccggaagttgaactgcagggtctggacgcgatcgaagttgaaaaaccggttgttgaagtcaccgacgctgacgttgataccatgctggaaactctgcgcaagcagcaggcgacctggaaagaaaaagaaggcgcggttgacgctgaagatcgcgtaaccatcgacttcaccggttctgttgacggcgaagagttcgaaggcggcaaagcctctgacttcgtactggcgatgggccagggtcgcatgatcccgggcttcgaagacggtatcaaaggccacaaagcgggtgaagagttcaccatcgacgtgaccttcccggaagagtaccacgcagaaaacctgaaaggtaaagcggctaagttcgttatcaatctgaagaaagtcgaagagcgtgaactgcctgagctgaccgaagagttcatcaaacgtttcggcgtggaagatggttccgtcgctggcctgcgcgctgaagtgcgtaaaaatatggaacgcgagctgaaaggcgctgtgcgtaaccgcgtgaagtctcaggctatcgaaggtctggttaaagccaacgagatcgacgttccggctgccctgatcgacagcgaaatcgacgtgctgcgtcgtcaggctgctcagcgtttcggcggcaacgagaaacaggctctggaactgccgcgcgagctgttcgaagagcaggctaaacgtcgcgtcgttgttggtctgctgctgggcgaagtgatccgcaccaacgagctgaaagctgacgaagagcgcgtaaaagccctgatcgaagagatggcttctgcgtacgaagatccgtctgaagtcgttgagttctacagcaagaacaaagagctgatggacaacatgcgcaacgtggcgctggaagagcaggctgttgaagccgtgctggcgaaagccaaagtgtctgaaaaagccacttccttcaacgaactgatgaaccagcaggcgtaatttcgccgctatcgtttaaggttcgagcaaaaacccgttgccgaaaggcggcgggtttttttttaagataatgatagccacaggcacggtgcgaaaacgcattaaccatgatagcgttacagcaaaagcttgttatgcttgaaatatggcaacaccatccccattaccgggggaggcaactgcatccgcaatcgcacgcgtattgaagaggcggtgacgcattcagcggatagaaactgtggctgataatccgtccgtaaggttacaatcagtgcagcaggtattttaaaattactccaggagacggaaatgtcatacagtggcgaacgagacaactttgcaccccatatggccctggtgccgatggtcattgaacagacctcacgtggtgaacgttcttttgatatctactcccgtctgcttaaggaacgcgtcatttttctgaccggccaggtcgaagaccacatggcaaacctgatcgtggcgcagatgctgtttctggaagcggaaaacccggaaaaagatatttacctgtacattaactctccgggcggggtaatcaccgccgggatgtcgatttatgacaccatgcagttcatcaagccggatgtcagcaccatctgtatggggcaggccgcttctatgggcgcgttcctgctgaccgccggggcgaaaggcaagcgcttctgcctgccgaactcccgcgtgatgatccaccagccgctgggcggctatcagggacaggcgacggatattgagatccacgcccgtgaaatcctgaaggtgaaaggacgcatgaatgagctgatggcgcatcataccggccagtctcttgagcagattgagcgtgacaccgagcgtgaccgcttcctgtctgctgcggaagccgtggagtacgggctggtcgactctattttgacccatcgtaattgatgcccaaggcgcaagggtgccgctttacgcttcatccttctcgccacgtctgtgcgagcggttggcttttattcggccgcttgtctggcaggcttgcggccggtggcttcgctaccggctcgatgtagcgcgaaggattttgtgtatatactaatgaagggcggcacaacgctatatggcggcttgcgcctgagaatggcatttgcgtcgtcgtgtgcggcacaaagaacttaaaaagaggtttggactcatgacagataaacgcaaagatggatcgggcaaattgttgtattgctctttttgcggcaaaagccagcatgaagtgcgtaagctgatcgccgggccatccgtgtatatctgcgacgaatgcgttgatttatgtaacgacatcattcgcgaagagattaaagaagtggcgccgcaccgcgagcgcagcgcgctgccgacgccgcacgagattcgccaccaccttgatgactacgtcatcggtcaggaacaggcgaagaaggtgttggcggtcgcggtatacaaccactacaagcgtctgcgcaatggcgataccagcaatggtgtagagctgggtaaaagcaacatcctgctgatcgggccgaccggttccggtaaaacgctgctggcggaaacgctggcgcgcctgctggatgtgccatttaccatggcggacgccactaccctgaccgaagccggttatgtgggtgaggacgtcgaaaatatcattcagaaactgctgcagaagtgcgattacgacgtgcagaaagcgcagcgcggcatcgtttatatcgacgaaatcgacaaaatttcgcgtaaatccgataacccgtcgattacgcgcgacgtgtcaggcgaaggcgtgcagcaggcgctgctgaagcttatcgaagggaccgttgccgccgttccgccgcagggcgggcgtaaacatccgcagcaggagttcctgcaggttgatacctccaagatcctgtttatctgcggcggcgcgttcgctggcctggacaaagtgatttcccaccgtgtggaaaccggctccggcattggttttggcgcgacggtaaaagcgaagtccgacaaagcgagcgaaggggaactgctggctcaggtcgagccggaagatctgatcaagtttggtctgatcccggagttcatcggccgtctgccggtagtggcgaccctgaacgagctgagcgaagaagccctgatccagatcctgaaagagccgaaaaacgccctgaccaagcagtatcaggcgctgtttagccttgaaggcgcagagctcgaattccgcgacgaagcgctggacgctatcgccaagaaagcgatggcgcgtaaaaccggcgctcgtggcctgcgctcaattgtggaagcggcgctgctggataccatgtatgacctgccttcgatggaagatgtcgaaaaagtggtcattgatgagtcggttatcgccggtcagagcaaaccgctgctgatctacggcaaaccggaagctcagcaggcatctggtgaataattaaccatttcactcaagcagttaacaaaaaggggggattttatctccccttttatttttcctgcattcccgccgttgaatgtgtggaatacatccccatatactggattacatattaacgacgatgcagtggagtgtggcgtcgtcggctacctggcggactttaaactaagagagagctctatgaatcctgagcgttctgaacgcattgaaatccccgtattgccattgcgcgatgtggtggtttatccgcacatggtcatacccctgttcgtagggcgggaaaaatctatccgttgcctcgaagcggccatggaccatgataaaaaaatcatgctggttgcgcagaaagaagcgtcgacggatgagccgggtgtaaacgatcttttcaccgttggaaccgtggcgtctattttgcagatgctgaagctgccggacggcaccgtgaaggtgctggtcgaagggctgcagcgtgctcgcatttctgcgctgtctgataatggcgagcatttctcggcgaaagcggagtatctcgactcgccggcgattgacgaacgcgagcaggaagtgctggttcgcaccgctatcagccagtttgaaggctatatcaagctgaacaagaagatcccaccggaagtgctgacgtcgctgaacagcatcgacgatccggcgcgcctggcggataccatcgcggcgcacatgccgctgaagctggctgacaagcagtctgtgcttgagatgtccgacgttaacgaacgtctggaatatctgatggcgatgatggaatcggaaatcgatctgctgcaggttgagaagcgcattcgcaaccgcgtcaaaaagcagatggagaaatcccagcgcgagtactatctgaacgagcaaatgaaagcgattcagaaagaactcggcgagatggacgacgccccggacgaaaacgaagcgctgaagcgtaagatcgacgcggcgaaaatgccgaaagaggcgaaagaaaaaaccgaagcggaactgcagaagctgaagatgatgtcgccgatgtctgcggaagcgaccgtcgtgcgtggctacatcgactggatggtgcaggtgccgtggaatgcgcgcagtaaggtcaaaaaagacctgcgtcaggcccaggagatcctcgataccgatcactatggcctggagcgcgtgaaggatcgcatccttgaatatctcgcggtgcagagccgggtgaacaaaatcaaggggccaatcctttgtctggtgggaccgccgggggtaggtaaaacctcgctgggtcaatccatcgccaaagcgaccggacggaaatacgttcgtatggcgcttggcggcgtgcgcgatgaagcggaaatccgcggtcatcgtcggacctacattggctcgatgccgggcaaactgatccagaaaatggcgaaagtgggggtcaaaaacccgctgttcctgttggacgagatcgacaaaatgtcttccgacatgcgcggcgacccggcttccgcgttgcttgaggtgctggatccggaacagaacgtggcctttaacgaccattatctggaagtggattacgatctcagcgacgtgatgttcgtggcgacttccaactccatgaacattccggcgccgctgttggaccgtatggaagtgattcgtctctccggctataccgaagatgaaaaactgaacatcgccaaacgtcatctgctgccgaagcagatcgaacgtaatgcgctgaagaaaggcgagctgaccgtcgacgatagcgccattatcggcattattcgttactacacgcgggaagcgggggtacgtagcctggagcgtgaaatctccaagctgtgccgcaaggccgttaagcaactgctgctggataaatcgctgaaacacatcgaaattaacggtgagaatctgcatgattatctcggcgtacagcgcttcgactatggccgcgccgatagtgagaaccgcgtcggtcaggtgaccggtctggcgtggacggaagtgggcggcgatctgctgaccatcgaaaccgcctgcgtgccgggcaaaggcaagctgacctacaccggctcgctgggcgaggtgatgcaggagtcgattcaggctgcgctgacggtggtacgttcgcgggctgataagctgggcattaacgccgacttctacgagaagcgtgacattcacgtgcacgtgccggaaggggcgacgcctaaggatggtccgagcgcgggtattgccatgtgcacggcgctggtctcctgcctgaccggtaacccggtacgcgctgatgtggcgatgaccggtgaaatcactctgcgtggtcaggtgctgccgatcggcggtctgaaggaaaaactgctggcggcgcatcgcggcggcattaagactgttctgattcctgatgagaacaaacgcgaccttgaagaaattccggataacgttatcgccgatttggatatccatccggtgaaacgaatcgaggaagttctgacacttgcgctgcagaacgaaccgttcggcatgcaggttgtgaacgcgaaatagtgattctgcgcaaattgcgctaataaaaatagggctggtaagtcatttcggacttgccagcctttttttgtgtagctaacttagatcgctggcaggggggtcatcgacaactgctgttgtaagggcatgacagtcctgatataactgctgcgcggtcgcactatgaaggactcaggtgcgatataaattataaagagaggaagagaacagtgaataaatctcaactgattgacaaaattgctgcgggtgcggacatttctaaagctgcagctggacgtgcgttagatgctttaatcgcttctgttactgaatctctgcaggctggggatgacgttgcgctggtaggttttggtacctttgctgttaaagaacgtgccgcccgtactggtcgcaacccgcaaacaggtaaagaaattactatcgctgccgcaaaagtgccgggcttccgtgctggtaaagcgctgaaagacgcggtgaactgatcggctttcccgtcagggaatgtgacgaagtacaagggcgcatcgtgagatgtgccttttttattgccttttcagaccactttatgtgtgtttatcgccacttgtgggctgacaatcaccctgttttcttgtcaaaatacgtcctcacgcgcggcggccatcacgtgctatgctgcgcgagctaaagtcatctacagcggagcgttgttacaccatgatggacaacctacgcacggccgccaacagcgtcgtgctcaagattattttcggtatcattatcgtctcgttcattttgaccggggtgagtggttacctgattggcggtggcaaaaactatgccgcaaaagtgaatggccaggagattggccgtgggcagtttgaaaacgccgtcgccagcgaacgtaaccgtatgcagcagcagcttggcgatcaattctccgagctggcggcgaacgaaaactacatgaaaaccatgcgccagcaggtgctgaaccgcctgatcgatgagtcgcttctggatcagtatgcccgcgagctgggcctcagcatcagcgatgagcaggtgaagcaggcgatcttccagacccaggcgttccagacgaacggtaagttcgacaaccagcgtttcagcggtattgtcgcccagatggggatgaccaccgatcagtacgcccaggcgctgcgtaaccagctgaccacgcagcagctgattaacgccattgcgggtaccgacttcatgctgccgggcgagtccgatcagctggcggcgctggtatctcaacagcgggtggtccgcgaagcgaccatcaacgtaaatgccctggcggcaaaacagaccgccagcgatgaggaaatcaacgccttctggcagcagaatcaggcccgttttatggcgccggagcagttccgcgtcagctacatcaaaatggatgccgccagcatgcaggagagcgtctctgacgacgagattcagtcatggtacgaccagcacaaggatcagttcactcagccgcagcgcaaccgctacagcgtgattcagaccaaaactgaagccgatgcgaaagcggtactggccgagctgcaaaaaggagcggacttcgccacgctggcgaaagaaaaatcgaccgatattatctctgcccgcaacggcggcgatatggggtggatggaagatgcctctaccgtgcctgagctgaaagatgccgggctgaaagagaaaggccagctgtctggcgtgatcaaatcctcggttggcttcttggtagctcgtctggacgacgtccagccggcgcaggtgaagccgctggctgacgtgcgtaatgacattgcggcgaaagtgaagcaggaaaaagcgttggatgcttactacgcgctgcagcagaaggtgagcgatgcggccagcaacgataatgaatcgctggcgagcgcagcgcaggtcgccgggctgaaggtcgtagaaaccggctggtttggccgcgataacctgccggaggagctgaactttaaaccggtcgctgacgctattttcaacggcggtctggtgggtgagaacggcgcgccgggcagcaactccgatatcattaccgttgacggcgatcgcgcttttgttctgcgcattagcgaacacaaagccgaggcggtgaagccgcttgccgaagtgaaggcacaggttagcgatatcgttaagcacaataaagcggaacagcaggcgaaactggaggccgacaagctgctggcggcgctgaaagacggcaaaggcgatgaagcgatgaaggcggctggcctgagctttggcgcgccgcagacgctttctcgtaccggccaggatccgctgagccagctggcatttaccctgccgctgccgcagcagggtaaaccggtctacggcgtgggcagcaatatgcaaggcgatgtggtgctggtagcgctggatgaggtgaaagccggcagcatgccggaagagcagaagaaggccatggttcaggggatcacccagaacaatgcccaaatcgctttcgaagcgctgatgagcaacctgcgcaaggcggcgaaaattaagctcggcgacagcatcgaccagcagcagtaatttcgcgtcgtctcgcaaaaatgagcaacacgatgtaatcctcaagggccgctttcgcggccctttccatttctgtgatttgccttttgtcgaccatccgcactgacgctatcgtgaccttgctgtctacacacaaggagatatcagcatgaaatatggaataaaagcactgatggccgcgggcgttctggtttttgcggtaggggtacagggggcgctggcggcacccgccagcggcaaagcggcggtgaataaagaaaatgtgcaggcgtcctcttcggcgaaggcggaagcggtgcccggcgagtctgacaacggggcgacaaaggtcagcattaaccgcgccagcgccgaacagctggcgcaggcgttgaatggcgtaggattgaaaaaagcccaggccattgtcagctaccgcgaagagtacgggccgttcaaaacccttgatgatctgaagcaggtcccgggaatggggagcgcgttggtggagcgcaatttagcccatctgacgctgtaaattttatgccagaccttgcacagcggtgattttttgccaggataaagaggttgcatcaagtggtgtgacctcttacctcataagcaacaataacagaaaggcattagtgctatgcagacacaaattaaagttcgcggctatcatctggacgtctaccagcatgtgaacaacgctcgctacctggagttccttgaggaagcccgctgggacggcctggaaaacagccccgcgtttcagtggatgatggagaaaaacatcgccttcgtggtggtgaatatcaatattaactatcgtcgtccggcggtactgggcgatgtgctgacggtgagcagcaaactggagcaactcaacggcaaaagcggcaccctaagccaggtggtcaccctcaaccccaatggcgaagtagtggccgatgcgctgattaccttcgtttgtatcgatttgaaaacccagaaggcgctgccgctggaaggggaattgcgtgcgaaacttgaccagatgaacctgcgctgacaaccgtcgtgcgagtggctggcccacggcaggtgatgaacccgtagccccggtaagcatcgcgccaccggggaatttgagtcaaagctccggtaaatcgatccccggagattatgcctgcgccagtccggttttttgctgcatcaccgccattaccccgaccttgtccgccagatactggttgagtccgtttgcgcgcaggttacaggcggcgcactggccgcagccatcgcccttaatgccgttgtagcaggtgagggtttcccggcgcaccagatccagctgaccccagtagtcggcgagcgcccaggtctcggctttattcagccacatcagcggcgtctcaaagcgaatgtctttcgccatccccaggctgacggcgtggtgcagcgctttgacaaactcatcgcggcagtccgggtagccggagaagtcggtctcgcacacgccggtgatgatggcttcggcttttacctgataggcgtagattgccgtcagggttaaaaacagaatattacgcccggggacaaaggtgttgggaatgccctcggcatcaggctgatagtccggtaccggaatgttatcgcgggtcaggctgctgactgccagttcgttgagcagagtgacgtccagcactttatgcgcgacggcgcccagtttcagggcgagttcgcgcgcaacgtcgatttccgcgcggtggcgttggccataatcaaaagtgacgcaatgcacttcatcatactgttgcagagcctgcaccagacaggtggttgaatcttgtcctccgctgaagacaactacggcgcgtttcatggcaattcctgactaaatgaataaaggcgatatggtagcgccagacgccctccatcaccagctctctcacgtcgacgaggccggcagccaggcgctggcgaagtcgaaccagccccgggcgttgaggcgcagaccattgacccccggtggcgcgctgatccgatagttatacttgaacagcggcgtcatgatggcgtcttccatcaggctgttaaatacgttgcgcagcgcatcgttgcggctgcgagcgtcgggctgagactgcaccgcgtctaatgtcgcctgcagatgagcatattgcgccccggtcagcaaattaggccacagcatatcgcagcgcagccactgttccagggcgtactccggcgcttcgccgatcagacggtcgcccatcatcaggtcggccagccccagatgctggcagccttcccagtttttagcgtcgtggaacaggagcgtcagctcgcagcccagcagagccagacgttgcctcagctgttcggccatcgcatgtagctcgaccggcagatgatagagcagggtgagcctggccggcagcggtaccgcgttgtttgccggtccctgcgggatggaccatcccggcagcacctcatggcttggcgtaatcagatcctcctccagcggcagcgtatccagtagcgacgagtgatggattatcgacaccagccgctgggcctgcgctttgctaagccgagggctgtggcgcagggtcaaatagcagaagccaaggctgatacggttgctgacctgacgcagattatgcagctcttcgcgatcgccgatggtgatctgcaccggatggcggcagctggtgccgagatcgcggtcaaagagctgaggagtgatccagtactccaccgcctggatcagcggatgctgcaggtggtagcggggatggttttccaggcggacgagttccggactaaaccgcttcaggcggaacggtccgcagccaatggccggatcgtcgggatgcgccagcacgctgcagtagctggcgaggcggaacggcagccagtagtcagggcgatgcagggttattgttaaacactgggcatgggtgacatcgatacggctgatgctggcgaagagggtccgcaaggcgggcagctcaagcagcagcagtaaccgctgtcgcaactgcgcggtttccaccgtatcgccattgtgccagcacagcgtggagcggatataaaaatgccagcgcaggccgtccggggagacctgccagtggtgcgccagatcgccgatcggcatattgtcgccttcgtcgaagcgcgtcagcccggcatagatttgtccggccagatgctgctcggcgcggccggggagaaagccgggacgcagcggctccagcgggcgatagtaaggaatacgcagcgtgggggtattgttttgccactgaccgccgaggaagggatggagcagggctttcagctccaccggggcaagctgcgccagctccagcgcggtttgttgctgaccgttgttcagcgcctgctccatcatctcgttgcgcagactttccggggttttgtgaaataagagctgtccgcgtttgccgcgcccggagctggcctgccagcttagccacccggcctcctgcgcctgacgcagcagagtacggacgtggcgctcgctgcaaaaacagcgctccgccagttcgccgacggtgacctgctgcggcgccccggctgagggttgccataggcgctggtattgatttaaacggtgtaagagtcgcatgggggccgtcgtccaccgggccgctgtaaacccggaacaattaataatatctattcactattacttccgtatatcccaggtgatactgcaacacaagcgaagcccatcacacatcggggaatataccatggcaaaactggcggcatttgatatggacggcaccctgctgatgccggaccatcgtcttggagaaaagacgctttccgcgctgaaacggctgcgtgagcgcgatatcaccttgaccttcgccaccggccgccatgtgctggagatgcaccatgtgattggcgaattttcccttgatgcatttctgatcaccggcaacgggacgcgcatccattcgctggaaggggaggagctttatcgccaggatctcgctcccgaggcggcggaagcggtgctgcacggcaaatgggatacccaggccagcatgcacgtctttaacgatggcggctggtttaccggccaggcaaggcctgaattgttgcaagcgcatgtattcagcggctttcactatcaactgtgcgatctaaagcgtatgtcggcgcagcatgtcaccaagatctgtttctgcggcgatcatgacgatttgcgccgtctgcggatccagctgaatgagacgctgggcgatcgcgcatttctctgcttctcggcaatggactgtctggaggtgctgccggttggctgcaataaaggcgcggcgctggcggtgctcagccagcatttaggcttcaccctgcaggagtgcatggccttcggcgatgcgatgaacgaccgcgagatgctgggcagcgttgggcgggggttcatcatgggcaacgcgatgccgcagctgatagccgagctgccgcatctgccggtaattggcgactgccggaatcaggcagtctcccattttttaactcattggctggataatcctgatcttccttattcccccgaatagagagacccttccagcaagccagataggcttctatctggctttttttatcgcctttcgaccagaccggcgatctccgcctgccagggcgcaatatcgccgatattgtccgccacccactgcgggttgtaatagctttccaggtaacgctcgccgctgtcgcacaggagtgtcactatcgagccggtgcgaccttcctcgcgcatccgcgcggccagctgcaatacgccccacatattggtgccggtcgaggcgccgaccttgcgcccaagctgcgtttccagccacagggcggtggctacgctcgccgcatccggcacgcgcagcatctcatcgacaacgtcgggaataaacgacggctcgacgcgcggccgtccgatgccttcaattttgctgccgaccgggctgcgcaggctggcgtcgcgggtctgccagtaatcgaggaacaccgaattctgcggatcaacgaccatcagctgcgtctcgtagccctggctgcgaatatagcggccaatggtcgctgaggtgccgccggtgccggcgctcatgacgatccatgacggctgcgggtgcggctcatggctcatctggcggaaaatactgtcggcgatattgttgttgccgcgccagtcggtggcccgctcggcgaaggtaaactgatccatataatggccgttcagctcgcgggccagcgtttcggaagccgcgtagatttcgccggcgctctgcacaaaatggcagcgtccgccgtagaactcgatctgttcgattttgcgtctggcggtgcaggagggcatcacagcgataaacggcagccccagcaggcgggcgaaataggcctccgaaacggcggttgaccctgaggaggactctataattggcgtgccttctttgatccagccgttgcacaagccatagagaaacagcgaccgcgccaggcgatgcttcaggctgccggtggggtgggtgctttcatctttcagatacaggtggatgcccggaaaagcgggcagcggcagacggatcaggtgcgtgtcggcggagcgctgatagtccgcgttgatttcgctaatggcatgtttaacccaggcgctattcatcgtgatttcctgtttgtcattttgtgcctagcttagcggaaagcgcaggaaaaattgttgccatttaacctgtggattaccattatgagagcaaaattttctctgaggatgcccaatgctagataaaattgaccgtaagctgctggcgctactgcaggaagattgcaccctctctttgcaggcgctggccgatgccgttaatctgaccaccacgccctgctggaaacgcctgaaacggctcgaagacgagggcattctccgcgggcgcgtcgccctgttggacgcggaaaaggtggggctggggctgacggcgttcgtcctgatcaagactcagcatcatagcagcgactggtactgtcagttcgtgagcgaagtgacgcagatggcggaagtgctcggcttctggcggatggcgggggagtatgactacctgctacgggtgcaggtggctgatatgaaacgctatgacgacttttataaacgtttagtgaacagtgtgcctggtctgtcggatgtcacttcgagttttgccatggaacagataaaatataccaccgccttgcctgtcgaataacggtattgcgccgtaacccattacaaaatcaggattttattgcttgcgattatttgctcaactcagctggtacttccgccgggagtggcgccgctatcttggcgcaattgccctgctggtcattattgccgtcctgcagcttattccgccgaaggtggtgggcattgtggtcgacggcgtgacgcaacaacattacaccgcggagaaggtgtggatgtggatcggcgcgctggtgctgatcgcggtgatggtctacctgctgcgctatgtctggcgcgtgctgttgttcggtgcttcttaccagttggcggttgagctgcgggaagatttttaccggcaactgagccgccagcatccggcgttctatttgcgccatcgcaccggggatcttatcgcccgcgccaccaatgacgtggaccgggtggtgtttgccgctggcgaaggagtattaaccctcgtggattccctggtgatgggctgtgcggtattgattgtaatgtcgacgcagattagctggcagcttactctgctggcgctgctgccgatgccgctgatggccctggcgatcaaacgcaacggcgatgcgcttcacgaacgttttcgcgttgctcaggcggccttttccagcctcaacgatcgcacgcaggagagcctgaccagcatccgcatgattaaggcgtttgggctggaggatcgccagtcggcgcagtttgctgccgatgctgccgataccggcgcgaaaaacatgcgcgtggcacgcattgacgcccgcttcgaccccaccatctatatcgccatcggggccgctaacctgctggccatcggcggcggcagctggatggtgatccacggcagcctgaccctgggccagctgaccagcttcgtgatgtatcttggcctgatgatctggccgatgctggcgctggcgtggatgtttaacatcgtggagcgcggtagcgcggcctatggtcgtatccgcacgatgcttgaagaggcgccggcggtggatgacgggaccgaggcggtgccggcaggccgcggcgtcctgcaggttgctatccgtgatttcatctatccgcaggcgagcaaaccttcgctggagcaggtaaattttactctccagccggggcaaatgctgggcatctgcgggccgacgggcgccggcaaaagcaccattctggcgctgctgcagcgccattttgacgtcactcacggcgagatccgctttcacgatctgccgctgccgattctgcagctcgacagctggcgcgcccggttggcggtggtcaatcagacgccatttttattctccgataccgtcgccaataatatcgcgctgggaaaaccggacgcgacgcaggcgcagattgagcgggttgcacaactggccagcgtgcatgacgacattctgcgtctgcctcagggctacgagaccgaagtgggcgagcgcggcgtgatgctctccggcggccagaaacagcgcatctcgattgctcgcgccctgctgctggaggccgaaattttgatcctcgacgatgccttatcggcggtggatggccgcaccgagcaccagatcctgcataacctgcgccagtgggggaggggcggacggtcattatcagcgcccaccgcctgtcggcgctcactgaggccagtgaaattttggtactgcagcatgggcatattgcccagcgcggccgccacgaggcgctggccgtgcagcccggctggtaccgcgacatgtatcgatatcagcagctggaggccgcgctcgacgaggttccgcagacgcaagaggaggccctggatgcgtagctttactgaactctggccgacgcttaaacgcctgctggcctatggttcaccgtggcgcaagccgttggccatcgcggtggcgatgatgtggattgcggcggcggcggaagtgagcggcccgctgcttattagctatttcatcgacaacatggtggcgaaacatacgctgccgctgaagctggtggccggcctggcggtagcctatatcggcctgcagctgctggcggcgctcctgcactataaccagtcgctgctgtttaaccgcgccgcggtcggcgtcgtccagcagttgcgcagcgacgtgatggatgccgccctgcatcagccgctcagcgagtttgatacccagccggttgggcagcttatctcacgggtaaccaacgatacggaagtcattcgcgatctgtacgtgacggtggtggctacggtactgcgcagcgccgcgctgatcggcgcgatgctggtggcgatgtttagcctcgactggcggatggcgctggtggcgatcacgattttcccggcggtgctgatcgtgatgattatctatcagcgctatagcacgccgatcgtgcggcgggtgcgcgcctggcttgccgacatcaacgatggcttcaacgaagtgatcaacggcatgggcgtcatccagcagttccgccagcaggcgcgctttggcgaacggatgcgcgaggccagctatgcccactatctggcgcggatgcagacgctgcgcctggacggttttctgctgcgcccgctgctgagccttttttcctcgctggtgctgtgcgggctgctgatgctgttcggctttagcgcggtgggcacgatcgaggttggggtcctgtacgcgtttatcagctatcttggacgccttaacgagccgcttatcgagctgaccacccagcagtcgatgctgcagcaggcggtggtcgccggcgagcgcgttttcgagctgatggatcgcccgcgccaggcgtggggtgcggatgacgcgccgctgagcagcggtcgggtggaaattgaccatctctcctttgcttaccgggggaccgtctggttctccaggatatcacgctggatattccctcccgcagcttcgtggcgctggtcggacataccggcagcggaaaaagtaccctcgccagtctgatgatgggctattacccgttaacccacggcgagatccgcatcgatggtcgaccgctcgcatccctcagccacagcgcgttgcgtcggggcatcgcgatggtgcaacaggatcccgtagtgctggcggataccttttacgccaacgtcgcgctgggccgggacatcagtgaggcgcaggtttgggaagcgctggaggcggtgcagctggcggcggtggcgcgcagcatgagcgatgggctgtacacccaactgggcgagcagggcaataatctctccgtcgggcagaagcagctgctggcgctggcgcgcgtgctggtggacaccccgcaggtactgattttggatgaggcgacggcaaacatcgactccggtaccgagcaggcgatccagcaggcgctggcgaaggtccgccagcataccaccctcgtggttattgcccatcggctgtcgaccattgtggaggccgataccatcctggttctgcatcgaggtcaggctgtcgagcggggcacccatcagcagctgctggcggcgaaaggccgctactggcagatgtatcagctgcagctggccggcgaagagctggcggccagcgccagagaggagtcgctcagcgcctgatgcaccaccagcaggcagggaacgctgggcggcctgcgatggtgcaaaaacgttacatcaaatgcaccgttgtggtgcatttttgcgcgccaggcgccgttgcgcaggatattgcctgacctgtcccctgttttttgccatcaaagggccgctttgcggccttttttcatttctggcatagcccttgctttatatccatcgtgttagctgcggccattaccgaatactgactggaggggacttatgaagctggttaccgtggtaatcaaaccattcaaactggaagacgtgcgtgaagctttgtcttccatcggcattcagggcctgacggtcactgaagtcaaaggatttggccgtcagaaaggtcacgcggagctctaccgcggcgccgagtatagcgtcaactttctgccaaaagtgaagattgatgtggcgattgccgacgatcagctggatgaagtcatcgatgtcatcagcaaagcggcttacaccggaaaaattggcgacggcaaaattttcgtcgctgaattgcagcgcgtcattcgcatccgtaccggcgaagctgacgaagcggcactgtaatttccagaccacacagtgatggggaacgaaacaatgaaaatggcaacaatgaaatcgggtctgggggcattagcccttctgccggggctggcgatggccgcgcctgcggtggcggacaaagccgataacgcgtttatgatgatttgcaccgcgctggttctgtttatgactatcccggggattgcgctgttttacggcggcctgatccgcggtaagaacgttctgtccatgctgactcaggtgattgtcacctttggcctggtctgcgtattgtgggtgatttatggctataccctggccttcggcaccggcggcagcttcttcggcagctttgactgggtgatgctgaaaaatattgagctgaaagcgctgatgggcaccttctatcagtatatccacgtggccttccagggctcgttcgcctgcatcaccgtcgggctgattgtcggggcgctggcggaacgtattcgtttctccgcggtactgatcttcgtggtggtgtggatgacactctcctacgtgccgattgcgcatatggtttggggcggcggtctgctggcgacccatggcgcgctggacttcgccggcggcaccgttgtgcacatcaacgccgcggtcgccgggctggtcggcgcctatatgatgggcaaacgcgtgggcttcggcaaagaagcgttcaaaccgcataacctgccgatggtgttcactggcaccgctatcctctacgtgggctggttcggcttcaacgccggctctgccagcgcagcgaatgaaattgcggccctggcgttcgttaacaccgtcgtggcgaccgctgcggctatcctggcgtggacctttggcgaatgggctctgcgcggcaaaccttcactgctgggcgcctgctccggggcaattgccggtctggttggcgttacgccggcgtgtggttatatcggtgtcggcggggcgctgatcgtcggtatcgcctctggcctggcgggtatctggggcgtgactgcgctgaaacgctggctgcgtgtggatgatccttgcgacgtcttcggcgttcacggcgtctgcggcatcgtcggctgtatcctgactggtatcttcgcggcgacttctctgggcggcgtcggttatgcggaaggcgtcaccatgggccatcagctgctggtgcaactggaaagtatcgccatcaccgtggtctggtccggcgttgtggcgttcatcggctacaaagtggcggatatgaccgtcgggctgcgcgtgccggaagagcaggagcgcgaagggctggacgtcaacagccatggcgaaaacgcctataacgcctgataaaaaagccattctctcctgatagcgaaaagcctcccgtccgggaggctttttttatgcgttgcggttgcgcatcaccccttcctgaaccgttgaggcaaccagcgtgccatcctgggtgtagaattcgccgcgaacgaagccgcgggcgctggaggccgaggtgctttcgacgctataaagcagccattcattaatattaaacggccggtggaaccacatagagtggtcgatggtggcgacctgcatgccgggctcaaggaaaccaacgccgtgcggctgcagcgccaccggcaggaagttaaagtctgaagcatagcccagcagatactgatgaatacgcagatcgtcagggacggcgccgttggcgcgcagccagacctggcgcaccggttcggcgatatggcctttcattgggttatgaaactccaccggacggatctccagcggtttatcgcagaggaatttgtctttcacctgcggcggcaggagatgcgccagcttgcgagcgatatcggtttccgaaggcaggccgtcaggggagggggcggccggcattgctttctgatgctcatagccattctctggcgcctggaaggaggcggtcatatagaaaatcggcttcccgttctggatggcggcgacccgacgggcgctgaagctgttgccgtcgcgcagcacctccacatcgtaaacgatcggcttctggctatcgccggggcgaagaaagtagctgtgaaacgaatgaaccagacgctcaacgggcacggtctcttttgccgcatacagcgcctgacccactacctggccgccaaaaacctgacgtaaccccaggtcttcgctctgcccgcgaaacaacccttcctcaattttttccagatctaataatgccagcaggttagagagtgcctgactcatacttatcctcaattaacaatagcggcgcagcgcgcgtaatgtggccaagtataacctggaatcgcaagtggtccgatgggtgtaataatctgaataacgaccagttaacaggaacaaatctgagatctgtgccacacttattgacgacacgaaagttcctgccggcgaagcggcggaacatcctcctgggtattaagggatgataaggagaacatcatgaaatttgcctatatgtttagtgccttagccgtcgccgcgacgctgaccgcctgtgctaatcaccactcgaacaattcttcgacgcaggcggccgcgcccgacccttacggtatcgcgacgctgagcgtggcgcagcagcagccgagcgtcacggggacgattaatatccgccagagaatcgctttaccgccggatgcggtactgacggtgaccctgtcggatgcttctctggcagatgcgccagcccgcgtattgtcgcaaaaagcggtgcgtaccgaaggcaaacaggcgccatttaactttgcgctgccttacaacccggcagatattcaaccgaacgctcgcattctgctaagcgcggcgatcacggttaacggccagttgatgtttattaccgataccgtgcagacggtaataaaccagggcggcactcatgccgacctgacgctggttccggtccagcagaccgccgttcctgtcgcccagtaagctcgctacgcccccggatgggggcttttttttgccttcaataaacccagcgataatgctggagatcgatatggccgctgccggagacctgcacaccctcggccagcagcgcctgacgctgccgctgtagatcggggccggtgagggagatatcgccatggcgattgaccacccgatgccatggcagggtggacccttccggcaggcgcttcaatacgccgcccacctggcgcgccgcgcgcggtgaacctgccagccgggcgacctcgccgtaggtcgtgacatacccttccggtatcgacgccacgatgtgccagacgcgttggggaaatgtgtcgtgcggagccattttctgtcctgttaccggcaaaacgtcagcataagcgctaagccaggagctgtacagccggcctgggtcaggcggcctgttcgacggtgaacgtcagagcgaggccgaggatctgcatgccatggacattgtccgaggctgagctggcgatgagactttcaagaaatttcaaccgctgcgaagtggcgttgatgatcagcctcgcgcgcaggcccggcatggttaacgacgagatagggtacaccacccgaccgctgatatagaccggcagcttgcgtagctccacctggcgcagcacgccgacggtggaatagagcagcgccagcggcgtaaccgcccgcaccggcgcgggactgatggtcgcgaagtcgagcattttttcaggacgcaggtagtttacgccctgaaaggcgatggtcatcccttcaatagcaggtaaaggcagagtgatggtctgtggtgatgagtcagtcattcgattaccgtcgagacaatgtactggtgataaaagaggacgaagaggataagtatggtggataacccggatgtgtgctgagcgcaggctcgcaatctcacaggctgaccgtgagtggctggttttattcgcgttattgcgcaataaaccagcaggcggacggtgtgagcttgcaattcaccaggtcagcagggataatgcgccagcgcgttaggcaactaacgctctcaatgggggctctgttggttctcccgcaacgctactctgtttaccaggtcaggtccggaaggaagcagccagagcagacgacgtgtgtgccgggatgtagctggcagggcccccacccatttctcccgcctggtgtttcccttatatttgtccggtttttattcctgcaataattaatttctgataaagatcgcatattagtttttgttgttaaaccccccttcttttattccataatatttacttgtcataaatctgaaatactactgaaatattaatgtcatttgcatgtcataaataaagcgcatcttactgatgggaatttgttgccaggctcatgctgtaaaatatatctctggatcagcatgttaacttcgtgtattaattatgatgattttattgcacgggaagcgtagctatgaccacagtggttttgaatgtaaaaattgacgcagagctaaaagaaaagttgcgtcattatgcggaagttaataacgagaacctgggaacggcaacggaaaagctgctgcagctggcttttcagctggaggagtcagcaggtgaggcgggggtgacggaagaggacattgacagccagcataccgaagaggaagcgacgccacttacccctaaagaaatcaaagcattaagaaaacttctgaagaagaaaaaatgaaacaacaattctctacagccagcaactatagcgaagcttgcgatatgttgcgctcaggatacgtaaaacacgtccgcctgaactggaatatcggtagtgatgagttctttcgcattgcttccgactggtgtgacaccggcgctaaaatcaaaaaagatgaagatggctttattatttccctgaaagggtttcctattccgcgccagcattaatgaaattgccttctttctgtcattgggttgccataaccagagggcaggatagccaggcaattttataaaaacatctcatatacctcatggatgaaggtcatttgacgggctgaagtcagcccgtcgctattttcttatattatttttcgcaaacgtgtattttccttctgttcagcaaggctttgccacagcggttgtagcgtggagaaggcccggcgcaatgcttcatccggcagcgtaaacggcagacgtaaatagcgatcgaacgccccttccagcccaaaccgcgtaccggtgccgatatggatcccctggctttccgcacgcgcagagaacagggtggccagcatgtcaggaagttccacccaaaaagagagcccaccttccggtggcgaaaaccgccagcggggaaaatattccgccatcagagtttcgcacatgtcccggcgcgccttgagcatatcccgccgcggcggcagcagtgtggcggcattttccagtagccagcagcaggccagttgctccagcagcggcgtacccaaatccagcgaatcgcgggcctgaataagcgaggcgatggtccgcgcgctggcgcggatccagccgatacgtagtcccccccagaagcttttcccggccgaaccaatggtgagcaccgcggcatcgggattaaagctggccagcggcgggggcggcggcgcgttataccaaaggtcggccatggtctcgtcgattaccagcgttgttcgcgtcctggcggcgatgtccgcgacccgctggcgggtgggggcatccatacagcgtccggtggggttgtgaaaatccggcatcagccacgccagccgcggcgcagtctgcgcaatagtcgccgccagtccatcgcagtcccatccctgctgcggaagcgcgaccccgacggggcggcaggaggcgccctgaatggcgctgatggccatcggataggtgggggcgtcaataaccacccgatcgcccggcccggtgaacaggcgcaggatcagcgcgaaggcgctgagggcgccgttgaccaccatcacctcatcgggccgcgtcggcagaccgcgttcgctgtagcgccgggcaatcgcctcccgcagcaccggcagcccctgctggtcatagccagtctgtgcgagatagggcggcagcagggtcatagcgtgctggaaggcctgatggacctccggcccggcgctgagggcggcagtagagagattaagcgtagatgagatgccggcaggcagaggaagatcggcggggcgttccggcaaaacaatgcgtgacccgctcccctggcggctgtagagaaagccctcctcccgcaactggccgagggcgctggcgatggtggtccggctgacgttcagggccgccgccagctcgcgctcgccgggcaggcgcgtttgcagcgtcaggcgaccatcaaggatcagcaggcggagcgcttccgccagctggcgccatagcggcgtgcgtgagctggtctcctgccagttgccgagcaggcgtaccagcgattgggttccaaagcgtcgggctgacatagcgatccacttttccaaaactggccattaattatcagtccatttttgctgatgatgagggcattcgcaatgatgttgaggaaaaaatatgcttcgtcgcctgctgcagttatatattggtctggtgctttacggcgtgtccacggcgctcttcgtgcatgccaatctcggcgccgatccgtgggatgttttccatctcggggtggctaaacagctggggatcagtttcggtacggtgattatcctgaccggcgcggcggtactgctgctgtggatcccgatccggcaaatgccggggctcggcacggtgagcaatgtcatcgtgctgggactagcggcggacgccacgctggccgtcctgccgccgctggagtcgctggtggcgcgcagtgcgctgctggtaggagcgattgtgctgaacgctatcgctaccgggatgtatattggcgcgggctttggccccgggccgcgcgatggcttgatgaccggtctgcatgctcgcactggttggtcactgcgcggtatccggacggcgatcgagctttccgtactgctgattggctggctgctggggggcaaatttggcgtcggaaccgtcatctacgcgctgtcgattgggccgctgatccagctgtgcctaccgtggttcagccagcccgtcagccgcaacgcggtcagccctccccgggaaatagtctcctgaattaacccatcgccctcttcatcacggagagggcctttcatcgcttacaggccgctcaggccatgaagcatcatgtagatccccaccacaataatcagtaagcctgagaaccagggcgccttgcgcgagaggtcgttaagccacggccagcggcgggtggcatgtttaaggctcagggcggcgatggccccggaagccaccagcgtcagcgccagaccaacgctaaagcccagcaccagcgtggcgcccagcgagaatttcttcagctgtaaacagataagcagcacggtaatggacgccgggcaggggatcagccccccggtcaggccaaacagcacgatctgcccggtcgtcacctggcggccatcaaagcgccggttgatctcctgagcatgggcccgctgatgcgcgtcctgccactcctccgccaccagcggcgcggcggatgaggacgcatggtgatggtcatggcggtgatcatggtcatggcggtgatcatggtcatggcggtgatcatggtcatggtggtgatcatgttcatggtggtgctcatgttcatggtggtgctcatggtgcgtgtgaggctgcgattcgcgccaggtgcgccagagcatccagcaggcaatcagcacaacgacaatccctgagaccagctgaaaccagggttcagaggtttgggcgttccagccgcggccaaaccacaggccggccatggcgatcagccagaccaccgccgtatgggaaaccgtggccgccagccccagcagtaccgcctgttttaacgttccccgtaccgccacgataaaggcggccatcatcgtttttgaatggcccggttcgaggccgtgcagcgcgccgagcagtattgcgctgggtataaacagccaggcattgccctgctgcagaagggaagtgaaatcgttcatatcgggatccttgccaaaagtgcgattatcctactcccccccagtagtaaaatactaccccccagtagataaagcggctaataaaaaggatcatggtatgctggcaggcgttgctgaccacgcaggtcggtaatcccggacagaatgaaacggtggatcgtgcaatgtcacatacagttcgacacaaaaagatgttactgacccggctgaagaaaattcaggggcagagtaccgcgttagagaaaatgcttaatcgcgagcatgagtgcgctgaaatattacagcagctggcggcgatccgcggcgcggtcaacggcatgatgctgcaggttattcaggggcatcttaccgaccatgtggtgaaagagcctgacgagacgcagcgcgaagcggatctggagacggtgatgcaggtgattaaatcctatctgaagtagcgccccctgacgttccgctcaagccacccgccgcttaatgcgcatggaggttatgctctgcccacagaatgaactgctcttttggcagcgctttgctgtaaagccacccctgggcgtactgaacgccatgctggcgcagccagtcgcgctggctttcggtttccaccccttcggcgacggtggccagattgagcgctttggccatttcaataatgtgcggcgtcagcggccggtactcgagggtatcgacaaaagatttatcgattttcagcgtgtcgacgtccagtttctgcagatagctcaggctggagtagccggtaccgaaatcgtcaatcgagatccgatggccagcctgacggtagtgagcgatcaccggcatagtcgtctccgggtcgacaaaaccgcgctcggtgatttcaaggatgatctgttcggcggcgatcccccagtgctgtagctgattgtgcaacaacgtcggcagggtgggcgagcgtaaatcatctaccgacaggttgatggagatgtgcacttccggccgctgccgcagccaggggccgagatcggcaaaaattttcctgacgatatcttccgtcagctgcgtgatgagcccggtctgctcggccaggggaataaagatatccggcgataaaaaagtgccatcgggctgctgccagcgggccagggcctccgccccggcaattttcccgtcctgcaacgaaataatcggctgatagtgaacctgaatcgcttcggaattgagggcgtccagcatgctgttgcgcggtgagcgcaggtgccttagcagacgcagcagcagccaggtggcgagcaggctggtgaaaatgccggcagggagccagaagaacagctgctgtcgaatgcgctgctgcagcggcaaggttgaagaccaggttacgatgccagagcccagctcgggaatgcgctggatccggtagactgtgttatccagagtaagcatatccacatgcggatctttaatgcgttgccagactttcgccggcagcggctgactgctgatcaccattttctggtggtccaggccaaacagcatggtatggatcttctcttcgctggcgggaacgacatcaataaaggagacggggtcgatcatcaccatgtgctgccggctgcccatggccgtcatctgatgatcgaggccaagatcgttaattgaggtcagccaggtgcgatagccgtcgggggcaatgtggtccggcggggggaaggtgaccgcgacgctatggtcttccagggaggagcattgcggcacggaatcacgcagccagagcacttcctgaatgtagcgatgggtataggcgatgcggcggagcgtaagcagatgttcagggctacaggaggcggcggtgtgtgcgtcagcctctcgtaacgcttcccgggcctggtcggcaacctgcagcgtccgaacgacgatacggttggaatagtcatccagttcacgatagaactgcattttggcctgccgcgccgcctgccagatgctgagtgaaatgggcaggatgatggccagtatcagcactcctgtaaacagcgccatcagatgccgggtcctcatgcctgtgtccttatcgttcgccgggtgtcatcagtatatgcgaaagataattcgggcgcagcgggagaaaacgcgtcgtttggggaaaaagccggcatcacaataggctgcgatgccgggagagaaggatgattccgatgtagcagaataaaaatgagggtgtgaatgccgggcagggtgtgttccggcattcagtcgcagcatacgctgcgcagatgacagcaatatgttagctagtgtgcatccggtgccgggatatcagcgctgatgcgcaggtcgttctcatcaaacaccatgcagaagcgctcatcgaaagccagattaattttctgccaggggcggaaatggacgtcgccgggcagcagaaccttgacgttgtcgtggccgtagcactggccgaacagataggtattgttgcccagacgctccaccacttcacattgaaactccaccacggtaccggtggtgatttccggggtgaggtgctccggccggatccccagcgtcaccgcagcgccgggcttcagcggctgggtggcgatattcagggccagctgatggtcctgcgcgagggtgaccgttaagcgttccggctgccagtcgctgacgatagccggcagaaagttcatcttcggcgagccgataaagccggcgacgaatttgttgaccggattgtagtacagcgccatcggcgaacccatttgttcgactttcccgtagttcatgaccacgattttatcggccagcgtcatcgcctccacctgatcgtgcgtgacatacaccatagtggtcttcagctcctggtgcagacgggcaatatgcaggcgcatatcgacgcgcagctccgcatcaaggttagagagcggctcatcgaacataaatacccggggattacgcacgatcgcccggccaatggccacgcgctgccgctggccgccagagagctgcttcggtttacgatccagcaggtgcgagagctgcagcgttttagccaccatttccacctggcgacggatctccgttttcggcactttattcaccttcagcccgtagcccatgttctctgccaccgtcatgtgcggatagagcgcataggactggaagaccatcgccacgccgcggcgggcgggcacgacatcattcatcacctcatcgccgatcagtacttctccttcgctgacctcttccagcccggcaatcatgcgcagtagcgtcgattttccacaaccggaagggccgacgaagacggcaaactcgccatcttcaatatcgagattgacctggtgcagcgtcaccgtgctgccgaaccttttggtgacattcctcagtcgtatattggacatccacattccccggagtgagtagctgttatttgccgttggcttatcgctatgttgagtgtgatttgtattacgtgtaacaaatcggtgtgacgatgttcaacagcagtaaaatcatgccctgactataacttccgcggattttgcgccatacagggacgtttcatttctgcaaggatgatcacacaactggcagcttatggtagttttatcaacgatcaaagcgtagcgtataacaaaagcgcatcagaacatgttttccaaataatacggcagtttgaaaagatttatttttctaactggcagacggaattcaaataaaaaccattaaattgttataccttcacatgaggttgataatgaaaaagaacacgcttgctgcactgatccttaccaccctggcggcgggacaactcgccagcctgcaggcgcatgccgccgggcagctcaacgtctgggaggacattaaaaaatccgctggcatcaaaaccgcggttagcgattttgaaaagcagtacaacgtgaaggtcaatctccaggagatgccctacgcccagcaactggaaaaactgcgcctcgacggcccggcgggcattgggccggacgtgctggtgatcccgaatgaccagctcggcggcgccgtggttcagggactactctcgccgctcagcgtcgatcaggcgaaacaggatgcctttacgccagcctccatcaatgccttccgcatggacaacgcgctgtatgggatcccgaaggcggtggaaaccctggtgcttatctacaacaaggacctgatcgacaagccgctggacagcctgcaggcctggctggactactcgaaaacccagcgcgagcagaacaaatacggcctgctcgccaagtttgaccagatctattacagctggggggcgattggcccgatgggcggctatatctttgctaaaaacgacagcggcggctttaacccgcagcaggtgggtctcaatacccccggcgccgtcgaagccgtcaccttcctgaaaaaattctatgccgagaaggtctttccggcggggatcctcggcgataacgggctgaatgccatcgattccctgtttaccgagaaaaaagcggcggcggtgatcaacggcccctgggctttccagccgtatgaagccgctggcattaactatggcgtggcgcccctgccgaccctgccggacggcaagccgatgagctccttcctcggcgtcaaaggctatgtagtatcgacctggagtaaagacaaagcgctggcgcaacagtttatcgagttcatcaaccagccgcagtatgtgaaagcccgctatgtcgccactggcgaaattccgccgctgaaggcgatgattgacgatccggtgattaaaaacgaccaaaaggccagcgccgtcgccatccagtcggcgcgagcggtggcgatgccgggcattcccgagatgggggaagtgtgggggccggccaacgccgcgcttgaactgagcctcaccggtaagcaggcgccgcaggccgcgctcgataacgcggtgaaacagatcacgatgcagatcgaagcgatgcaggccagcaatcagtaattcaccgtcacgtgaagtcaccgagcgggagggggacctcccgtttgtagaaggagtcgagtgtgagcatccattccagcgaaaattttagcgacgcacgcgggcccgggcgccatgcatggtgcggcctgctgctggcaatcgtgccgggtttcggtcagttttatcatcgccagtggctgaaagggctggtcttcctggtgctgctgagcagctttatggggattttttatgatttcctgcgtgaggggttgtgggggttatataccctgggtgaagaggtaccgcgggataactctatcttcctgttagccgaggggattatcagcgtgctgatcgtcgctttcggcgtgctgatctattttctctcgctgcgggatgcgtggctcaacggcaaaaaacgcgatgaggggatcgccctcaacagcgtgcgtaagcagtaccagatgctgctgagcgacggctttccgtacctgatgatcaccccgggctttattctgctggtgtttgtggtgatctttccgattctgttcggtttcgccatcgccttcaccaactacaacctgtaccacaccccgccggcgaagctggtggactgggtggggctgaaaaactttattaatattttcaccctctccatctggcgctccactttcctggatgtgctgcagtggaccgtggtgtggacgctgctggcgaccaccctgcagtgtacggtgggcgtgttgttggcgattctggtgaaccaaaaagatctgcgctttaagccgctgatccgcaccatctttattttgccgtgggcggtgccggggtttgtcaccattctcgtttttgccggtatgttcaacgactccttcggggtcatcaacaacgcgatcctgtccttttttggcatcagtccgaaggcatggctcaccgatccgttctggaccaaaacggcgctgatcatgatgcagacctggcttggcttcccgtttgtctttgccatgaccaccggcgtgttgcaggcgatcccggacgatctgtatgaagcggcgacgatggacggcgccagcgcctttacccgtctgcgcaccatcaccctgccgctggtgctgtatgcgatcgcgccgatcatcatcacccagtacaccttcaactttaataacttcaatatcatttacctgttcaacaacggcggccctgcggtggcaggctctaacgccggcgggacggatattctggtgtcgtggatctataagctgacgatgtcttcgtcgcagtacgccatcgcggcgaccatcacgatcctgctgtcgatctttgtcgtcggcctggcgctgtggcagttccgcgccaccaaatccttcaaaaatgacgacatggcgtaagggaagcaacatggctcaatcacccagtattaaacgcgaaaagtggatccggctctctctcacctggctggtggttattctggtctcagtggtgattatctatccgctggtctggacggtcggggcgtcgctgaacgccggcaatagcctgctcagtacctcaatcattccggaaaatgtgtcgttccagcactatgccgatctgttcaatggcaatgtgaattacctcacctggtactggaactcgatgaaaatcagcttcctgactatggtgctgaccctgattagcgttagctttaccgcttacgccttctcccgcttccgctttaaagggcggcagaacgggctgatgctgttcctgctgctgcagatgatcccacagttttccgcgctgattgccatctttgtcctgtcgcaactgcttggcctgattaacagccatttggcgctggtgctgatctacgtcggggggatgatcccgatgaatacctggctgatgaaggggtatctcgacgcgatccccaaagatctggatgagtccgcccgcatggatggcgccagcagctttcgcatctttatcgagatcatcatgccgttgtcgaggcccatcctcgcggtggtggcgctgttctcgttcactgggccgctgggggatttcatcctctccagcaccatcctgcgtaccccggataaatacacgctgcctatcggtctgtataacctggtggcgcaaaaaatgggtgccagctacaccacctacgcggcgggggcggtgctgatcgccgtaccggtggcgatcctctacctggcgctacaaaaatacttcgtgtccggcctgacctcgggcagtactaaaggataagcacatgaaaagattcacacccgcatggcttgcggtttgtctggcatgcagtttctccacctcttctctggccgcggacgcgcttgcaacccgcgcgtttcagggcatgccggcggactttatcaaaggcgcggatatctccacgctgctggacgccgaaaagcacggggcgacgttctacgatcagaataatcagcgcaaggatccgatcgctattctgaaagagaacggcgtcaactatgttcgcctccgtctgtgggtggatccgcaatcggcgagcggtgagggctatggcggcggaaataacgacctggccaccaccctgaccctcgcgaaacgggcgaaagcccaggggatgaaactgctgctcgattttcattacagcgatttctggaccgatcccggcaagcagttcaagccgaaagcctgggaaaagatggattatccgcagctgaaaacggcgattcatgactatacccgcgataccatcgcccgctttaagcaggcaggcgtcctgccggatatggtgcagatcggcaacgaaatcaacggcggcatcctgtggccggaagggaaaagctgggggcaggggggcggcgagttcgaccggctggctggcctgctgaacgcggctatcgctggcctgaaggagaacctgcgccagggcgagcaggtgaaaatcatgctgcatctggccgaagggaccaagaacgataccttccgctggtggtttgatgagatcgacaagcgccatgtaccgtatgacgtgattggtctgtcgatgtacacctactggaatggcccgatcagcgccctgaaggccaatatggatgacatcagcaaacgctataacaaagacgtcatcgtcgtcgaggcggcctatgcctataccctggccaactgcgataacgcggaaaatagtttccaggcaaaagaggaaaaggatgggggatatcccgccagcgtacaggggcaatataactatattcacgatttaatgcaggcggtggttgatgtgccagaccagcgtggcaaaggtattttctattgggagcctacatggattgccgtgccgggaaatacctgggccaccccggcggggatgaaatatatccacgacgagtggaaagagggtaatgcacgtgaaaatcaggcgctatttgattgccagggaaaagtattgcngtcggtaaaagtttttaattaattttttgtcgtctttttcaggaagtttattatgaataaatttgcacctttacatccgaaggttagtacgctgctgcatggcgcggattataatccggagcaatgggagaatgaccccgatattattgataaagacattgccatgatgcagcaggcaaaatgcaatgtgatgtcggtgggaatatttagctgggcgaaactggagccacgcgaaggggtatttaatttcgcctggctggatattatcctcgataaactgtatgccgccggcattcatgtctttctggccacgccgagcggcgcgcgtccggcgtggatgtcgcagcgctatccgcaggttctgcgggtggggcgcgatcgggtgccggccctgcacggcggccgtcacaaccactgtatgtcgtcaccggtctatcgcgagaaaaccctgcaaatcaataccctgctggcagaacgttattcctcacacccggcggtgctgggctggcatatttccaacgaatatggcggtgaatgccattgcgatctctgccagaaccgttttcgcgactggctgaaggcgcgttaccagaccctggagaacctcaaccaggcctggtggagcaccttctggagtcatacctatactgactggtcgcagattgaatcgcctgcgccgcagggcgagatgtcgatccacggtctcaatcttgactggcatcgctttaacaccgctcaggtgactgatttctgccgccatgaaattgctccgctgaaggcggcgaatgcctccctgccggtgactaccaactttatggagtatttctacgattacgactactggcagctggcggaggcgctggatttcatctcctgggacagctatccgatgtggcaccgcgataaagacgaaaccgcgctggcctgttacaccgcgatgtatcacgacatgatgcgcagcctgaagggcggcaaaccgtttgtgctgatggagtccaccccgggcgccaccaactggcagccgaccagcaaactgaagaagccgggaatgcatattctttcctcgctgcaggcggtggcgcatggcgccgactcggtgcagtatttccagtggcggaaaagccgcggttcggttgagaaatttcacggcgcagtggtcgaccacgtcggacatattgatacccgcattggccgcgaagtctgccagctcggcgagatcctcagcaagctgccggaggtgaggggctgtcgcaccgaggcgaaagtagcgattatcttcgaccagcagaaccgctgggcgctggatgacgcccaggggccgcgcaatcttgggatggaatatgagaagacggtcaacgagcactaccgcccgttctgggagcagggcatcgccgtcgatgtgattgacgccgatgtcgatttaacgccgtatcagttagtgattgccccgatgttatatatggtgcgcgacggctttgccggtcgggcggaggcgtttgtcgccaacggcggccacctggtgaccacctactggaccggtatcgtcaatgagtccgatctctgctatctcggcggcttcccgggcccgctgcgcaatctgctggggatctgggcggaagagatcgactgcctgaatgacggcgagtttaatctggtgcaggggcttgccgggaatcagtgcggtctgcagggcccttatcaggtgcgccatctctgcgaactgatccatatcgagagcgcccaggcgctggccacctaccgggatgatttttatgccggacggccggctgtgacggtgaacgcgttcgggaaaggcaaagcctggcatgtggcctcccgcaacgatttagccttccagcgcgatttctttaccgccctgagcaaggagctggccctgccgcgggcgatagcgacggagttaccacccggcgtggtggcgactgcgcgcaccgacggtgacaacgcatttatcttcctgcagaactacagcgcgcaaaaccataccctgaccctgccgcaagggtattgggattgcctgaccgacgcggcggtatcggctcctctgaccctgtcggcatgggattgccgtattctccgtcgtcacgcgtaatttcttcttctccacgcctgctctgacgagcaggcttttttttatcttaaacctggagtttattatggtgagtttaaaatccttcctgcactatttctccccagcgcgtccggcacagccattaagcgaggcggaaaaacagcaaatcgaggcgcttattcaggcctttggtggcgaagcgaatattacgcaagtggacgcctgtattacccgtctgcgggttagcgttcgccatcttgcggccgtggactccgaagcattacagcagcagggcgcgctaggggttattattcttggtcagcaggtgcatgctattttcggtaaacagtccgatgcgctgcgtcagcttctggatgaacattttgccgcccggaaataaataaaacgggataacctgaaagcaggttatcccgaaaataagacaaagacagcagtggcaataaagtttaccggaagataattaacagtcttacagcaggagataaaaataacgtatgagtcttagccgtgcgcgattaccaccaggcctcaacctgcacgccgaaattccaggtattattcgccgtctggtcttcaaacggtttaccatcttcggaatcattcaaatatgaagcaaaaatgcgtaattccggacgtgacataaagtctggcccgtccgccaggcccaacgcaatggtgtatttctcaccggcctgtttgtagctggtgccattgttgtagctgtctttctgatagaaaccgccgacttcgccaatcaggcgcacgtagtcggtgaactggtactgcccgcgggcgaccagcgacagcatccgcgttttgtcggtatagtcggtaatgtcatccgccgagccccaggtcagaacgtggttgatagaaaacttctctgtaatcgggatcaggccggtgttaatcacgcgataaccggtggcgtcgttcacgtagttccacatatcgtaccagccgccgccctgggagaccatgttctgcgccaggcctttgttggcgtactgcagcacggttttgttatagccgcccagcatatcctgactgatttcaccggtcagcatgacgccgttgtcagcatcgtacagtccgccgtagctatcctgttttttggtggtgtttggcatcgcgtagtcgataccgaattcggtccacgagcccgcccatggcttccagcccgcgtagcgtaaatcgatatagttgatattgacgttgctgtcgccatcgacgcgatagtcaacatcgttggcatcgccgcggatccaggccagcgagacggcgcccgggccgagggtgtagttttccaccccggctccggagccggaaatgttccagtatttggtatcgatgatatgcagatcatggcgctggtagtaacgtttaccgccccagatcaccgcattcggatcgccagggatcagcccctttatctgcaggttcaactgacgtaagccgaactgtgcatcatcgttcagcgtggtttcattatcgttagagccgtcggagaccatgctgaccatactgtcgagatagaagctgacgtcatctttcttatagacctcagagcccagctccagctcgccgtaggtatccgactcgttccccaaacggcccagcttatttttttgccattccgcttcgctaccgtcgccggagaccccaaccccggcgcgcatatagccatggaaatcgatcgttgggatcgcggcggtggccgcaaacgcggaaggagcgattagcgcagcggctaacgcgactgaaagggcgcgcagtgtagtgttcatctctatcctcttattgttttgtattacgttcacataactggtgtcataaaatgcctaaatgtaacttcaggcaaatgagatatgattattgtgtgactaactgcaaataatcacggtggtttttgttgcgatgggtgagatgattcacaattcgttgtattgtgaacgtaatacttttatcgctattgttttgcagtgagaggtggcggtgagcgttttttcaaatggcccctgttacaatcatgggataacaacataaggaaccggaccatgaagtctaaaagcgctactctggaagacgtcgcacgccatgcgggcgtctcttaccagaccgtgtccagggtactcaacaaatcagctaatgtatccgaagcgacgcgtcgcaaggtggagaaatcgatagaggccttacgctatgtgccaaaccggctggcgcagcagctggtggggaaggagagccagacggtcgggctggtgactatttctctggcctggcatgcgccttcccaggtggcggcagcggtaaaacgctatgccaacctggaaggttaccaggttctgatttcgatgatcgatgagagcgtcaaccaaagcatccaggattccatcaatgagctgaaatctcagcgggtggataaagtcattatcaacgtgccgctggagaccgaacaggcgcagaaaatcgctgctgacaacgatgatatcgtctgcctgtttctcgacgttgatccctacagctccgtgtttaacgtttcgtttaacccggcggacggcacccgggccagcgtcaaatatctctatgagatggggcatcgggagatcgccctgctggcggggccggacagctcagtctcggccaaactccggttaaaaagctggctggagaccctggatggttacggtctgaagccggtgaccgtcctgcacggcaactgggatgcgcagagcggctacgccggcgcgctgcagatgctgcgcgaaacgcctaatttcagcgctgtgctggtgggtaatgatcagatggcgctgggggtgctcagcgccttccatcagcatcaggtggcggtgccgggtgagaagtcggttattggctatgacgatacctacgaaagctcctttttctatccggcgctgagtaccgtgtcgctcgacctcgacctgcaggggaaagaggcggtgcggcggatcctcgccagcaccagcggggcgcctcatacctcatccattctgccggcgcgcctggtgatacgccattccagcggcgcccgaatcgagcagggaaaagatctacaggccattgcggaacagctccgcgccatcgcccaccgtctggcaccctgacgccaaaggcggggaaactcgccttatcaccttacccttaaattgagcagggttgatctttgtcacagcagggcgtaaccttattgttatgttataacgtaataaagaggtcatcatgaaagcccatatccatcctccctatcgtacggtggtgtttcacgacaccagcgcgaatgagtattttaaagtcggctcaactatccgcaccgatcgcgtgattgaactcgatggcgaaacttttccgtatgtgacgatcgacgtctcctcgaaatcgcatccgtactacacgggcaaacaaaaaaccttcgccaatgaaggcagtgcagcccgattccgccagcgcttcggcggctttattgatgcgaaaaggaaagcatgatgcaggtcgtcaactcattacgtagcgctaaacagcgccacccggattgccagctggttaaacgcaaagggcggctgtacgttatctgtaagagcaacccccgcttcaaagcggtgcaggggcgcaaaaaacgccgttaacggaaactctccagcgagcggcgctgttggccgtcggcggtaaaattgtcggcggccagccattggcgcatggcgttatccagctccggccattcgccgtctatcaccgaaaaccagtccgtgtcccggttgtgtcctttactcaccagcgcctggcgaaaacgtccttcgtactgaaaccccagccgccttgccgcccgggctgatgggatattaagactgttgcatttccattcatagcgacggtagccgagcgtatcaaagacatactgcatcaacagccagtgcgcttcggtggccatggccgttcggctcagtaacggtgaaaaatgcacatgccccacctctaccacaccgtgagcgatatcgatacgcattaacgccagcgagccgaccgctttccctcgctgctggtcaacgacggcaaaatgaatcgggtctgccagcgtggcgacctgctccacccaggcactgaattctgcaaggttgttctcaggttcacgcagcagccacgtccagctgcgggcgtctggcgccagctggtgagcggcgaacagatcgctggcatgagcaagagtcagcggttcgagtcgacaacggctgccctgtaatacctgtcgtgtcggccaggggcgcggctgccagtcaggcagcgcgacgccgagcgcctggccaaactgattatattcgcacattgcggtttccttattggggatttacaggcagcgtacgcgctcgctggttccataaaaagtgccattagagtatgtttttatggggccacgaggaggcaatatgaatataccggacgaggggttttttacgctgttgacgcaggggatgcggaaccgcacggtcgaaaccttacagcgcgccctttaccacaccttacgtgacgctatcctgcagggaaccctgacggcccgctgccgtttacccggatcgcgggtgatggccgaacggctacacctgtcgcggaatacggtcaatgccgcactggaacagctggcgctggaggggtacctgacacggagccgtcagggaacgcaggtggcaccactcgcctcctgccgccaggaggcgggtcagatgccgcccgtcgtgcttcctgagcggctgcaaaggctgccagccgcgatgcgccgcgactcaccgacgctggcatttacgccaggcatgccggcggtaaactatttcccgctgccgctgtggcggcgactgatggataacgtgctacgcgaagatggtagcgcgctgctgggttatggcgaagccgcgggcgatcctttgctgcgagaggctatcgctcgtcatctggcgctctcccggggcatccggtgcgatatccggcagatcgtcattaccgaaggcgcgctggaaggcgtcaacttatgcgcctcgctactgaccaacccgggcgacagcgtgtggctggaagaaccggggtacctgggggcgaggagtggcttccagcgggcggggctgcgggtcagaggaatggctgtcgacgatgaagggatgtgtattgccaacggcgtcgcggagccgccccggctcattttcacctctccttcacaccagtatccctgtgggagcatcatgagcgccgggcgccgtctggcgctcgtggaatatgcccgccggcacggggcgtggattgtggaggatgactacgacagcgagtttcgccatagcggagaaccgatcccggcgatgctgggaatggtgcctgatgccccggtggtctatctcggcaccttcagcaaaacgctgtttccagcgttgcgtatcggttttatggttatgccgcccgcgctggcggatgctgctcaggacgccattggcgcgctgctgcgcgggggacaccgtgctgaacagcgggcgctggccagctttatcgagaagggacactatgcgcgccatctggcagcgatgcgccgcctgtaccgtaaacgtcagcaacagctgcgcgaggcgctggcgcaagagataaccgtgccgtgcgacgttctcggcgggggaggggggatgcacctgacggtggcgatggagggcgttaatgaccggacgcttgcgcagcaggcgcgccagtttcagctggcgcccgccgcgttaagtcatttctatctcgacccgcagcgagcgcggagcggactggtgcttgggtatggcaatacctctgcttctcgctatctcccggcgctgcggaccctaaatcgccttattgcgcagcaccggcgcgcgtgagggtaaagacatcgtagaaggagagctcgcctttggtggcgaccatctttttgagctgcgccttctgctcgctatcgacgtctggcgactgcaggatacggtcgatcagctgccgggggacaaagcgggtgttgtaccattccccgttgtagcacacgcgaaagtcgaggacatcgatatcctcgtagcgatagcgtggatagacgtcaaagaagaaaaaggcgttgaacagaatgaacagcaccaccagcaaccagaccgagtctaccagcgtttcagagcgcagcatgaccaccagcgtcgccagaaacgcggcatacatggcaacaaacagtcccggatggttgcggataaaactgatgctaaaacgcgggcgattatcgcgtttttcctggacgttgagttcgtcaatggtgtgaatcagcaggcgttgtatttctgtcatcttggtcctcgaattctgcaatgagcctgccgcgcccggcggaccaggcgcggcaggctcagcctgaaggctattttatgttgcaatattctgcggagaaagtaacagatcagttacagaaaagcataacagttacggatttgtcggcggaaggcgcttaatgatctgcgccgggttaccgccgacgacggtacaggcaggtacgtctttggtgactaccgcgccggacgcaatgaccgcattatcgccaatggtcacgccgggattgatcactgcccgacccccaatccacacattgtggccaatagttaccggcttgccgtattcctggccgctattacgcgcatcggcgtccagcggatgagtggcggtataaatatggacgcctggcgccagcatacagttatcgccaatatggatagggcagacgtcgagcatcacgcagtcaaaattggcgtaaaaaccggcgccgagaaaaatattataaccatagtcgcagcgaaagcttggctcgatatacgcatcgccggcgcgagcgaacagctcggccagaatatgctgacgttgttcctggtcatccggggcggaatgattataacggtgcaacaactgtctggcgcgcaggcgatcggcgcgaagcgttgggtcgccagataaatagagctcaccggcgatcattttgcgtttttcttcactcatgggtcttccttatacctgactgttgatggccgtagcagtataaaaaagaaaccggttacagggttgctgttggctgaatgatgtgatgtctatcacaaagataccctatggcggctgacccgtaccgtccggccagcagaccacgtaatacgcgtaaattagcggataaatttccagacagaagtcgggattttatcgtatagcttattcatggtcagttccgccagacgatggtcggcagctgagtaaaataccgccagctcattatcagacagttcatatttatttttttcaatgacgcgctccagcgtgtcaattgtctggcaacgacgtaagcgcatcaaatagtctgttttagttaatggcttatcagacataattccaccttttgattgtaataattctaacacgatagactggccgggttttcccggctggcgttgacaaagcaacgaaatagtcggttaccggattttttccacttttgcaaatccgtagagttaatgccgtagttactgaacaacgtaaaagtgtcgtccagatattcgtcaacctgagcgatcagcttattatcctctgcatacttaattttataattaagagcgaatgtggcaatgtgctcgatcaattcatttaactggagattgacagccgacgtcgggtcgttgacccagccatggttgctctcttccaggtttgcaaggcagtcatgatacagcgtttcgcagagaaagcgtagctgtgcaatatcatgtctttttggcgagtattcgtccataacgcatccccttttgagtggtttaaacgacgactagcaaacaccgttgtgggatgaacacgactaactgacctgacactaactgagtaatcctgctgatttaactataatccactctccaacagatttcatcgtgctattacgaaaaattacaattatcagcgagaaattatcttaaaaatagacgaattaatttcgcaggcgctggcccacagccggagaaatagagaaatcttatgaatcattggtttaaggcaggcagctgtcgcgttcagaaaccgccgacccgtggataatgatagtaggattattcctggtaaatgagtgtttgccgatcccgagttgttgaacaagctgctaaaaatagcctgcgccatatcaatatatattaaatgcagaacgaaaaataaacaatggcaatatgtgccttgccagccagtgataaaaaagggccgcggtagcggccctttgttcaggagtgaagattaatgatgctcaacctgatggctgtgctctatatcttccgattttttgctaaagcggcgacgaaccaccacaaagaacaccggcacgaagaagatcgccaggatcgtcgcggtcaccatcccgcccattacgcctgtaccgacggcgttctgcgcaccggagccggcgccggagctgataactagcggcattaccccgaggatgaacgccagagatgtcatcaggattggacgtagacgcatacgtactgcttcaagcgtcgcctcaatcagccctttgccctctttctccatcaggtctttggcgaattcaacgatcaatattgcgttcttcgccgacaggccgatggtggtcagcagacccacctggaagtaaacgtcgttggttagcccgcggaaggtggcggctaacagcgcaccaaccacacccaaggggacgaccagcataaccgagaacggaatcgaccagctctcatacagcgccgccagacacaggaagacgacaatcagcgagatggcatacagggcaggggcctggttgccggacagtcgctcctgataagacatcccggtccagtcgtagccgataccggaaggcagtttacccgccagctcttccatcagcgccatcgcctcaccggtactcttgcctggcgcggcctgaccgaggatttccagtgacggcagaccgttgtagcgttccagacgcggcgaaccgtattcccaacgcgaggtcgagaaagcagagaacggcaccatctgaccatcgctgccgcgaacataccacttgccgatatcttccggcagcatacggtatttcgcttcggacatgatgtacactttcttcacgcggccgcggtcgataaagtcgttgacatagcttccgccccaggctgcgcccagcgtggtgttaatgtcgctgatggagacgcccagcgcctgagctttctcctgatcgatatcgattttaaactgcggtgtatcttccagaccgttagggcgcacgccggtcagcacgtcaggatgctgcgccaccatgccaaacagttgattacgcgcctgggtcagtttttcgtggcccagaccgccctggtcaatcagctcgaagtcaaagccggtcgcggtacccagttcaacgatagccggcaggttaaaggcgaagaccatcgcatctttaatctgcgagaagtagcccattgctctcgcggtgatcgcttcaactttgttttcctcacccggacgctggctccagtctttcagcgaaacgaacgcgataccggtgttctggccgcggccggcgaaaccgaagccgttaaccgcaaacacggattccacgttatccttctctttggtgagatagtaattcgtcatctcatccagcactttctgcgtacgctcctgggtggcgccggcaggcagctgcgccatactcaggaatacaccctggtcctcgtccggcaggaacgagctcggtagacggacgaacagccatgccatacccaccacgatgatcagatacagcaccagataacgaccggtgctgcgcagaatgttgcctacgctgtcggtgtaatggtgcgtgctcttatcaaacatgcggttaaaccagccgaagaagccggtggtcgcgccatggctgcctttctgaatgggtttcagcatcgtggcgcacagcgccggcgtcaggattaacgccaccagtaccgacagcgccatcgcggaaacgatagtgatggagaactggcgatagatggccccggttgagccgccgaagaacgccatcgggataaataccgccgacagcaccatagcgatacctaccagcgcgccctgaatctgtcccatcgatttacgcgtcgcttctttcggcggcagaccctcttccgccatcacgcgctcgacgttctctaccaccacgatggcgtcatccaccaacaggccgatggcgagcaccatcccgaacatcgtcagggtgtttatcgagaagccaaacgccgccagcaccgcgaaggtgcctaacaggaccaccggtaccgcgatggtggggatcagggtggcgcggaagttctgcaggaacagatacatgaccaggaacaccaggatgatcgcttccaccagcgttttaaccacttcgtgaatagaaattttcacgaacggggtggtgtcatacgggtaaacgatcttcatccccgacgggaaaaacggctccatcttcgccagttcagcgcgaatagcgttggcggtatccagcgcgttcgcgccggtagccagtttaatacccagaccggatgccggctggccgttaaacttcgccactacgtcatagctttcgccgcccagctcaattttggcgacatcacgcagacgaacctgggaaccgtcctggttcaccttcagcaggatgttgccaaactcttccgtattggtcagacgcgtctgcgcgatgatcgaggcgttaagctgctggcctttcaccggcggcgtaccgcctaactggcccgcggccacctgggcgttctgcgctttcagggcgctgatcacatccaccggcgtaagctggaagttgttcagtttgtttggatccatccaaatacgcatcgcatactgggaaccgaatagctgaacgtcgccgacgccgctggtacggctaatcggatccttcatgttggccgccacgtagtccgaaatatcgtcctggttcatggtgccgttggtgttaatgacgccgacaaccatcaggaagctgctggacgctttctcaacgctaatcccttgctgctgtacttcttgcggcagcagaggcgtcgccagcgccagcttgttctgaacctgaacctgggcgatatccggatcggtaccggattcgaaggtcagcgtaatggttgccgtaccggtggagtcgccatttgaggacatgtacatcaggtgatcgataccgttcatattctgttcgataacctgagttacggtgttctgcaccgtttcggcgtcagcaccggggtacatggcggtaatggaaattgctggcggcgcaatcgtcggatattgcgccaccggcaatttgaggatcgataatcccccagccagcatgatgataatggcgatcacccatgcaaatatggggcgatcgataaagaaattaggcatgtcttaacggctcctgtttaagttaagacttggtttgttctgatggcgcgttgcctgcggcttgctgtttatcatcagaagctacttcctgcgcttttacctgcacacctggtttgattttttgcaggccggtgacgataacgcgatcgccggatttcagaccgtcagtgaccagccatttatcgccgatcgcctgagaagcagtgacctggcggacttcgactttatcgccttcccccactaccatgacgctggcgtcgccgcgcggcgtacgggtaacaccctgttgcggtaccagcagggcgtcagggttaatcccttcttccagacgggcacggacgaacatccccggtagcagggtgtgatccgggttcgggaaaatagcgcgtagcgtgattgagccggtggtctgatcgacggtgacatccgagaattccagcgtgccggactgcggatacttaagaccgtcattagtcaccagctccactttcgctttgccgttttcctgtttcaggcggccgtcggctagctcctgcttcaggcgcaggaaatcattgctcgactgggtgacgtcaacatagatcggatccagctgctgaacggttgccagggcggtcgtttgaccattctgtaccagcgccccttcggtcacggcggatttaccaatccggccgctgatcggcgaggtgactttggtgtaggccagattgatgcgcgcggtttcaacggccgctttcgccgcgaccacggccgcattgctctgctgcgccgtcgcaacggcggtatcgtagtcttgttgactaatatatttggtgcccaacagtttctgataacgcttgaccgtcagttgatccatgtttgccgccgcctgggcttttgccaggtcgcctttggcgctgtcatagctggcctgataggtggctggatcgatctgatacagggagacgccggcctggatatcgctaccttccacgaagttacgttttaaaataatgccactgacctgaggacggacttccgcaatgcgataggcgctggtgcggcctggcagttcggtggttatttgtagaggtgcggatttgagcgtcacaataccgacttccggcatgtgctgggctccctgttgagccggtttatcgtcacatcctgttagcgctaagctgcctgagagcatcagaacgaccgccagaggcgttaaccctctgtttttgttcatatgtaaacctcgagtgtccaatttcaaaatgttcagtggctcaaacaaccacaaacccactacagtctttctattatggtcatgctatggtacatacattcacaaatgtatgtaaacgtaacctctgtaaagtcattaacctatggcacgaaaaaccaaacaacaggcacgtgaaacccggcaactgattctggatgttgctctgcgtctgttttcgcagcaaggcgtatcatctacctcgttggcaacaattgcaaaagctgcgggtgtaacgaggggggctatctactggcatttcaagaataaatcagatttattcaacgaaatttgggagctgtcagacgccagtattagcgatctcgaaattgagtatcgggcaaaattccccaacgatccactctcagttatcagggagattctagtctatgttcttgaagcgacagtgacagaagaacgtcgacgattaatgatggagattatctatcataagtgtgagttcgtcggtgaaatgaccgtggtgcagcaggcccagcggcagctctccctggcgagttatgagcgtatcgagcagaccttgaaagaatgcatcgcggcgaagctgctgcccgccaatttactcacccggcgggcggccgtgttaatgcgcagctacctttccgggctgatggaaaactggctgtttgcccccgattcgttcgacctgcatgcggaagcgcgggactacgtcgctattctgctggagatgtatcaattctgcccgacgctacgcggcccggagagcttgtcagcttaaaggtagcgcgcggatgggcgtgaatttttagcgccgtccgccgctattcgccagcgctgagaagtgctattctgcgcgcttgcgacgacccccggtattctccggcatttgcattcattcatattaactatgctgcacacgatctccaggcaacgcgccacgttcatctttattatcacgctgctctgttttattggccttttcagcccagtccagggccgcgccgcggatctccccgatcgggcagaggtgcagagccagctcaatacgttaaacaagcaaaaagaactgactccgcaggacaaactggtccagcaggatctgactcagacgctggaaacgctggataaaatcgagcgtatcaaaagcgagacggcacagctgcgacagcaggtcgagcaggcgccggcgaagctgcgccaggcggtggagagcctcaataacctgagcgatgtcccgaacgacgacgcgacgcgcaaaacgctaagtacgctctccctgcgtcagctggagtcgcgcgtcacccagacgctggacgatctacagaatgcgcaaaacgatctggcgacctataacagccaactggtttccctgcaaacgcagccggaacgcgtgcaaaatgcgatgttcaacgcctcccagcagctgcagcagatccgcaatcgtctgaatggcacctcggtgggcgacgagaccctacgcccgacccagcaggtgctgttgcaggctcaacaggcattgctcaacgcgcagatcgagcaacagcgcaagagcctcgaaggcaacactatcctgcaggataccctgcagaagcagcgtgactacgtcaccgcctggagcaaccggctggagcatcagctacagctgctgcaggaggccgtgaacagcaaacggctgaccctgaccgagaaaaccgcccaggaggcggttacccccgacgaaacggcgcgtattcaggccaacccgctggtcaagcaggagctggatattaaccatcagctcagcgagaagctgatccaggcaacagagaacggtaaccagctggtgcagcgcaatatccaggtcaagaactggctcgaccgcgcgctgcagtctgaacgggatattaaagagcaaatttcagttctgcgggggagcctgctgctgtcgcgtattctttaccaacagcaacagacattaccgtcggcggatgagctgcaggatatgaccaaccgcatcgccgacctgcggcttgaacagtttgaggtgaaccagcagcgcgacgcgctgttccagagcgatgcctttgtcgccaaactggaggaggggcacagcagcgaagtgaacgatgaagtccacgccgcgctactggaagtgatcgacatgcgtcgcgaactgcttgatcagttcaacaaacagttgggtaaccagctgatgatggccatcaacctgcagatcaaccagcagcagctgatgagcgtctcgagcagtctgaaggaaattctgacccagcaaattttctgggtgaacagcaataaaccgatggactgggagtggattaaggccttcccggaggcgctgaaaggtcagtttaaggcgatgaaaatcaccgtgaactgggaaaaagcgtggcctgcggtgtttgtcgctttcctggccggtttaccgctgctgttgattgccggcctcatccgctggcgtctgcagtggctcaaggattatcaggcaaagcttgcttcccaggtgggacagctgcgcaacgatacccagttgcatacgccgaaggcgatcctgatcgatctgatccgcgccttaccggtggtgctgttgattctggctatcggtctgatcttactcaccatgcagttaaatattagcggactgctgtgggcgtacagtaaaaagctggctatgttctggctggtgtttggcctgtgctggaaagtgctggaaaagaacggcgtcgcggtcaaccactttaatatgccggcgcagttgaccagccactggcggcggcagattgttcgcgtcagcctggcgctgctgccgctgaatttctggtcggtgatttccgaactgtcgccgctgaacctgatggacgacgtgctggggcagttggtgattttcttcaacttactgctgatcgcggtgctggtttggccgatgtgccgggaaagctggcgcgataaagagtcgcacagcctgcgtctgctgacgatcacggtgttgtctatcgttccggtggccctgatggtgctgacggcaaccggctacttctacacgacgctgcgtctggcgggacgctggatcgagaccgtgtatctggtgatgatctggaacctgctgtaccagacggtgctgcgcggcctgagcgtggcggcgcggcgtatcgcctggcgccgcgcgctggcgcgccgtcaacatctggtgaaggaaggggcggaaggcgccgagccgcaggaagagccaactatcgctctcgagcaggtcaaccagcagacgctgcgcatcaccatgttggtgatggtcgcgctgttcgcagtgatgttctgggcgatttggtctgatttgatcaccgttttcgcctacctcgacagcattaccctctggcactacaacggtaccgaggcgggggccagcgtggtgcgcagcgtgacgatgggcagtttgttgttcgccattgtggcgtcaatggtcgcctgggcgctgatccgcaacctgccgggtttgctggaggtgctggtgctgtcgcggctcaacatgcgtcaggggacctcctacgccatcaccaccattctcaactatgcgattatcgctatcggggcgatgacggtattcggggcgctgggtgtctcctgggataaactgcaatggctggcggccgcgctgtcggttggtttaggttttggtctgcaggagatcttcggtaactttgtctccggcctaatcattctgttcgaacgtccggtgcgcattggggatacggtcactatcggaaccttctcggggacggtaagcaaaatccgtattcgcgccaccaccatcaccgacttcgatcgcaaagaggtgattatcccgaacaaggcgttcgttaccgagcgcttgatcaactggtcgctctccgacaccgtgacccgggtggtgatccgcctcggcgtcgcctatggctcagacctggataaggtgaaagaggtgctgctgaaggccgcgcacgatcatccgaaagtgatgcaggagccggcgccagcggttttcttcaccaccttcggggccagtaccctggatcatgaactgcgtctgtatgttcgagaactgcgcgatcgcagctacacggtagatgagctcaaccgcgccatcgaccgcctgtgccgggagaatgacatcaacattgcctttaaccagctggaagttcatctgcgcaatgaaaaaggcgatgaagtcaccgaagtgaaacgggacgggaaaggcgacgatctggcgcccaccaccgcgtcctgatcgaagaggggcggcgcaaagccgcccctgctgtatcagggcgccagcgcggcgagttcttcatcgctcagcccggtgagctcctgcacggtttgacgttcgaggccgcgcgccagcattctggcggcgatgctgcgggtagcttcctgctcaccctcttgctgtccctgtttacggcctttctcttccagccattcggcaatggtcatcatcagctccttatgcctgggcgactgcgccgccagagtgcggatcagcgcccccggatgttccgtagttcccgcctgcaacatatagcgcagcagcgtattcagctgcgcttctgtcagatagccttgcgtcatcagcgcaatcagcggcacctgcagctcggccagatcgcgatggcggatatgcttttgcagcagctccagcatggccatccgccgatgacgggcgatctgattatctggcattacggtgaggtccaccagtggaaaatcattgctatagagcgccttcgccagcgccggatcggcgaatagctgttgccagttgcgggcccagggccaggggctcactttgccgtgataaaacagaatcggcaccaccagcggcagagtgtcgtggccggcgtccagatgacgctgcatggcggccagcgcatagcgcagcaggcgaaacgccatcagcttgtccggggtactctggtgctcaatcagcgcgtacacatagcccggtccatgacgcgtgcgcagtgagtaaaggatatcggaatagctggcgcgcaggtcctcttcaacaaagctaccggagaccagctgcagcgaatccagttcgcagatcgccagaaacggcgcggggaggtacaactgcaaaaaatccttcgcgaccgcctgatgcatgagcatctggcgaaacaccgcgtcgtgtggggtttgactgactttttccatcaatattgtctccagtggcgtcatgcgcagaggaccagactgccagcacactgccggagacaacatcctacttctctgggttttgcgacccgctttccgcgttttttaacttgtttgcataatcccgccggacaatttccagcgcgctcagcacggtttgcgccgggatctgatgcgattccagcaacatgattaaatcgacggccagtttgacctcatcggatgcattttccagcgacatcgggctctcctgttagcgcgtcagccgcgccagtacgttttcaatcttgtccagcgcctgtcggcagcgcgccaaccggccgctgtaggcttcaacttctttccccagccgctgctgctcgtcaaggctggtcgcctgcgccagctgacgctggcgttggtcgcgcatcgccagcaggcggcgctcatactcctgatgctgcaggcgacggcgctgccagcggctcaacgttggcgacgcgtggtcccaactgcgcaaggaccaggtggcggtttcacggcgcagcgcggcgatttgtgccgccagacgctcggcaatccagaccacctgcggcagctgctggcgctcgacggcctggcggagctggttaaagttgtgttgggcttccgccagataggcctgcatcagcgtgctgcgggtgtggaagagctggcggtcaaagcgcgggctgagggtcgcgtgctccgccagcggcgccaccagcgcggccagctcactcagctggtcgttcagcgtttgtaaaagttgagcagttttcaccaaccccctccattttccgtcagccaactgtgctacagtagcctcatctgtttgataacgattcgcattatgccacctgttattttaaccattatcggctggctggcggtagcgctgggtacgctgggcgtcttcttaccgttgctgccgacgacgccgtttattctgctcgccgcctggtgctttgcccgctcatcgccgcgctttcaccagtggctgctgtatcgctcctggtttggcggctatcttcgccactggcaacagtaccgcgccatgcctcgcggcgctaaaccgcgcgccattgcgatgatcgtggtgacttttgctatttcgctatggctggttaagcttacgtgggtgcgcatcatgctgttggtcattctggcctgtctgctgatctttatgtggcgcattccggtggttgacgcaaagcaacaaaagcactgatgcgcaataatgcctgttgcaattgttgccgacagccagtaaattctggcgttttcgagcgcgggcaagcctggtcaaaggttaaacaaatgtttctttggccccttttgcacgcccgtgggtaataccgtttcaatcaggcatacacttatgaccgcaactgcacagcagcttgaatatctgaagaacagcatccagagtatcgaggattatccaaaacctggcattcttttccgcgatgtcaccagcttactggaagacccgaaggcctacgcgcttagcattgaactgcttaccgagcgctacaaagacgcgggtattaccaaagtggtagggactgaggcgcgtggcttcctgttcggcgccccggtcgcgctggcgctgggcgtgggctttgttccggtacgcaagccgcgtaagttgccgcgtgaaaccattgccgagacctatgagctggagtatggcaccgatcagctggagatccacgttgacgccattaaaccgggcgataaagtgctggtggttgacgatctgctggcgaccggcggcactatcgacgccacggtcaaactgatccgccgcctcggtggcgaagtgcacgatgccgctttcattatcaatctcttcgatctgggcggcgaacagcgcctggagaagctggggatccactgctactgtctggtgccgttcccgggccactaagcaaatccctccacatagcctcgccgatcgggcggggctgtgatagcatgaccccttcgtgatttcaccttccagcgtttcagagccagcccatgagttatcaggtcttagcccgtaaatggcgcccacaaacctttgctgacgtcgtcggccaggaacatgtgctgaccgcactggcgaacggcttgtcgttagggcgcattcatcacgcttatcttttttccggtacccgcggggtcgggaagacctccatcgcccgtctgctggcgaaagggttaaactgtgaaaccggcatcaccgccaccccctgcggcgtgtgcgataactgccgggaaattgaacaggggcgctttgtcgatctgattgagattgacgccgcctcgcgaaccaaagtcgaagatacccgcgatctgctggacaacgtccagtacgcgccggcccgcggccgctttaaggtctatctcatcgacgaagtccatatgctgtcgcgtcacagcttcaacgcgttgttaaaaacgctggaggagccgccggcgcacgtcaaattcctgctggcgacaacggatccgcagaagctgccggtaacgatcttatcccgctgcctgcagttccacctgaaggcgctggacgttgaacagatccgccatcagctggagcatattcttggcgaagagcagattgcctttgagccccgcgcgctgcagctgttgtcgcgggcggccgatggcagcctgcgcgatgccttaagcctgaccgatcaggcgattgccagtggggaagggcagctgacggccgcatcggtgagcaccatgctcggcacccttgatgacgatcaggcgctgtcgctgattgaagcgctggttgctgccgacggcgagcgggtcatggcgggcgtcaatgacgccgccgcacgcggcgtcgagtgggaggcgctgctggtcgagatgcagagcctgctgcaccgcatcgccatggttcagctgtcgccttcggcgctgggcgccgacatggccgcggtcgaagtgcggatgcgcgaactggcgcgaaccgtaccgcccggcgacgttcagctctactaccaaacgctgctgattggccgcaaagagctgccttacgccccggaccggcggatgggcgtcgaaatgacgctgctgcgtgccctggcgtttcatccgcgtaagccgctgccggagccggaggtgcagccggcacaggccgccgcgcccgcgccgcgtcagccggttgcccccgccgcgccgccgccacagtcgccgcagagtttgccgccgaccaccagccaggtgctggcggcccgcagccacctgcagcgcagtcagggagcaaccaccccaaaaaagagtgaaccggcagccgcttcccgcgcgcggccggtgaataacgctgcgctggagcgactgagttcgattaccgagcgcgtccaggctcgtccggccgcggccgcgctggagcaggccccggcgaagaaagaggcctatcgctggaaggcgacgacggtggtggaagagagcaaagtcgaagtcgccacgcccaaagcgctgaaaaaggcgctggagcatgagaagacgccggagctggcggccaagctcgccgaagaagcggtcgagcgcgacagctgggcggcggaagtgagccagctggcggtaccgaagctggtcgagcaggtggcgctcaacgcgtggaaagagcaggagggcagccgcgtctgtctgcatctgcgtcccagccagcgccacctcaattccgccagcgcgcagcaaaagctggctgaagcgctgggggtgttgtacggtacgccggttgaattgaccatcgtggaagacgataatcccgcgatgcgtacgccgctggagtggcggcaggctatttatgaagagaagctcgcgcaggcgcgcgaagccattatcgcggataataacattcagaccctgcgtcgtttcttcgacgccgatctggatgaagagagtattcgccccatttgaatgccagtctgactggcattcagtacctttaacgatgactgactgagagagaagcctatgtttggtggaaaaggcggcctgggtaacctgatgaagcaggcccagcagatgcaagaaaaaatgcagaagatgcaggaagagatcgctcagctggaagtaaccggcgaatccggcgcgggtctggtgaaagtgaccattaacggcgcgcacaactgccgccgtgtggagatcgacccaagcctgctggaagacgacaaagagatgctcgaagacctggtggctgccgcgttcaacgacgccgcgcgccgtatcgaagagacccagaaagagaagatggcttccgtttctgccggtatgcaactgccgccaggcttcaagatgccgttctgatgcaaaccagcccgctgttaactcagcttatggaagcgctgcgctgtctgccgggcgtcggcccgaagtcagcgcagcgcatggcgtttaccctgctgcagcgcgatcgcagcggcgggatgcgcctggcgcaggcgctgacgcgtgcgatgtcggagatcggccactgcgccgattgccgcaccttcaccgagcaggaggtgtgcaatatctgcagcaacccgcgtcgccaggaaaacggccagatctgcgtggtagagagtccggcggacatctatgccattgagcagaccgggcagtattccggccgctacttcgtgctgatggggcacctgtcgccgctcgacggcatcgggcctgatgacatcgggctcgatcgcctggagcaacggctggaggcggagtcgatcaccgaggtgatcctcgccaccaacccgaccgttgagggcgaggcgacggccaactacatcgcagagctgtgcgcgcagtatggcgtcgacgccagccgaatcgcccacggcgtgccggtgggcggcgagctggagatggtcgacggcaccacgctgtcccactccctggccggtcgccacaagattactttctgaacaaatggaggcggccttcgccgcctccgcttgaaaaatttccccgctgtccccatctcccactcaacggttttttacccatttaaaatggcattgttgaggttgaatcagatgaaaggacaagaaactcgtggttttcagtcagaagtaaaacagcttctgcacctgatgatccattccctctattccaacaaagaaatctttctgcgtgagctgatttccaacgcctctgatgcggccgataagctgcgtttccgcgcgctgtcgcagccggatttgtatgagggagacggcgagctgcgcgtgcgggtttcgtttgataaagacaaccgcaccctgaccatcgccgataacggtatcggtatgaaccgggaagaggttatcgaccatctcggcaccatcgccaaatccggcaccaaagcgttcctcgaatcgatgggttctgaccaggcgaaggatagccagctgatcggtcagttcggcgtcggcttctattcggccttcatcgtggcggacaaagtgaccgtgcgtacccgtgcggcgggcgacaagccggaaaacggcgtgttctgggaatccgccggcgaaggcgaatataccgtagctgatatcaccaaagccgatcgcggcaccgaaatcaccctgcatctgcgcgaaggcgaagatgatttcctcaacgactggcgcgtgcgctctatcatcagcaagtattccgaccatatcgcgctgccggttgagattgaaaaacgggaagagaaagacggcgaaaccgtgatttcgtgggaaaaaatcaacaaggcgcaggccctgtggacccgcagcaaatccgaagttaacgacgacgaatacaaagagttttataagcatatcgctcacgactacagcgacccactgacctggagccacaaccgcgtggaaggtaagcaggagtacaccagcctgctgtatatcccgtcgcaggcgccgtgggatatgtggaaccgcgatcataaacacggcctgaagctgtacgtccagcgtgtgttcatcatggacgacgccgagcagtttatgccgaactacctgcgcttcgtgcgcggcctgatcgattccaacgatctgccgctgaacgtctcccgtgaaatcctgcaggacagcagcgtgacccgcaacctgcgcaccgcgctgaccaaacgcgcgctgcagatgctggataagctggcgaaagacgacgctgaaaaataccaaaccttctggaaacagttcggcctggtgctgaaagagggcccggcggaagatccgagcaaccaggaagcgatcgccaaactgctgcgtttcgcaaccacccataccgactcctccgcgcagaccgtgtcgctggaagagtatgtctcgcggatgaaagaaggtcaggagaagatctactacatcactgccgacagctatgcggcggcgaagagcagcccgcacctcgagctgctgcgtaagaaagggattgaagttctgctgctctccgatcgcatcgacgagtggatgatgagctacctgaccgagttcgacggcaaagcgttccagtctgtcgctaaagccgacgagtcgctggacaagctggcggatgaagtggacgagtccaccaaagaagccgaaaaagcgctggagccgttcgttgagcgggtgaaaaacctgcttggcgaccgggtgaaagaggtgcgtctgacccatcgtctgaccgacaccccggcgatcgtcaccaccgacgccgacgagatgagcactcagatggcgaagctgttcgcggcagcgggccaggcggcgccggaagtgaaatacatcttcgaactgaacccggcgcatcagctggtgaaacgcgcggccgatacccaggacgacgcccagttcggcgaatgggtggaactgctgctggatcaggcgctgctggccgagcgcggcacgctggaagatccgaaccagtttatccgccgtatgaaccagctgctggcttcctgacgcgaacctgaacgagtagcccggccgagcgacgcgacgccgggaacgggataaatgccccgtctgagcgatgtgctcaggcggggcatttcacattggattgcataaaatatctcaccattaaccgtttcagccgcaccgccttccttgagccatcgccgttctggtggtatggtttagcgtttttgaaaaattgaatcgacttttgaggggattttcgtaatgcgtattattctgcttggcgctccgggcgcgggtaaaggaactcaggctcagttcatcatggagaaatacggtattccgcaaatctccaccggcgatatgctgcgcgcggcggtaaaatccggctctgagctcggtaagcaagcgaaagacattatggacgctggcaagctggtgaccgatgagctggtcatcgcgctggtgaaagagcgtatcgcccaggaagattgccgtaacggcttcctgctggacggcttcccgcggaccattccgcaggctgacgccatgaaagaggcgggcattaccgttgattacgtgctggaattcgacgtgccggacgaactgatcgtcgaccgcatcgttggccgtcgcgtccacgcggcatccggtcgcgtataccacatcaaattcaatccgccgaaggtggaaggcaaagacgacgtgaccggcgaagagctgaccacccgtaaagacgatcaggaagagaccgtgcgtaagcgtctggtagaataccatcagatgacagcgccgctgatcggctactacaccaaagaagcgcaggcgggcaacaccaaatacgccaaagtcgacggcaccaaagcggtagctgacgtgcgcgccgaactggaaaaaatcctcggctgataaagccttttctcatcctgctgcggcaggatgagaactcctctcacttctaccttttgctatgattggttccgtttagtgccatttcagctacaattggctgcgattcaaatggttaagaggcggtaatgcatcagacgaaaacaggtatcttgctggccaatttaggcactcccgatgcgcccacccccggggcggtgaagcgctatctgcgacaatttctcagcgacaaacgggtggtggatacgtctcgtctgctatggtggccgctgctgcgcggcgtcatactgccgattcgctccccgcgcgtggcgaagctctatcagtccgtgtggatggaagagggatcgccgctgatggtgtatagtcgtcgccagcagcaggcgctggctgccaggctgccggataccccggtggcgctgggcatgagctatggttcaccgtcgctggccagcgcggtggatgacttactggcgcagggggtggagcacatcgtggtgctgccgctgtatccgcaatattcctgctcgacggtggccgccgtctgggacgaactggcgcggattctggcgaaaaagcgcgccattccgggtatctcgtttattcgcgactatgccgaacatccggactatatccatgcgctggcggccagcgtgcgcgcttccttcgctgtccatggggaaccggatctgctgctgctctcctatcatgggatcccgcagcgctatgccaaccagggcgatgattatcctcagcgctgtcgcgatacgacgcgggaactggtttccgcgctggggctgccgccggagcgggtgatgatgactttccagtcgcgctttggccgggaaccctggctgacgccgtacaccgatgaaacgctaaagatgctcggcgagaaagggacgaagcatattcaggtgctgtgcccggggtttgccgccgactgtctcgaaacgctggaagaaatcgccgtccagaaccgggaaatattcctcgaagcaggcggcaagcaatatgaatatattccggcgcttaatgcggacgcagcgcatattgagatgatggtcaatctgacggcgccttatcgctgatcgcgcgcagggcggggaatatgctactatttcccgcttgttccctgttatttaagcgccactatgaaatttcccggtaaacgcaaatctaaacactattttcccgttaacgcccgcgatccgctgctgcagcaaattcagccggagaatgaatccagcgtctcctgggtggtcggtatcgaccagacgctggtggatatcgaagcgaaagtggatgaggcgtttatcgtgcgctacggcctgagcgcgggccattcgctggtgattgaagatgacgtcgccgaggcgctgtaccaggagctggtgcgcaacaatctcattacccatcagtttgccggcggcaccatcggcaataccatgcacaactactcggtgctggcggacgatcgctcggtgctgcttggcgtgatgtgcagcaatatcgaaatcggcggctacgcctatcgttacctgtgcaatacctccagccgcaccgatctgaactatctgcagggcgtcgacggcgccattggccgctgctttaccctgatcggtgacagcggcgagcgcaccttcgccatcagcccgggccacatgaacaagctgcgtcccgaaagcattccggaagcggtgatcgccggcgcctcggcgctggtgctgacctcttacctggtccgctgcaagccgggcgagccgatgccggacgccacgatgaaggctattgagtatgccaaaaagcacgatgtgccggtggtgttaaccctcggaaccaaatacgtgattgccgataacccggcgtggtggcaggagttcctgcaggagcatgtctctattctggcaatgaacgaagaggaaggggaagcgctgaccggctttgccgatccgctgtcagcggcgaataaggcgctggactgggtcgacctggtgctgtgcaccgccggcccggcgggcctgtatatggcgggcttcaccgaagaagaggcgaagcgtaaaacccagcatccgctgctgccgggggcgatcccggagtttaaccagtttgaattcagccgcgcgatgcgtcaccaggattgcgttaatccgctgcgcatatattcccatatcgctccctatatgggcggccccgagaagatcatgaacaccaacggcgcaggcgacggcgcgctggcggcgctgctgcatgacatcaccgccaataactaccaccgcaataacgtccccaactccagcaagcacaaatgcaaatggctgacctactcctcgctggcgcaggtgtgtaaatatgccaaccgcgtgagctatcaggtgctgaaccagcactcgccgcgtttaactcgcggcctgccggagcgtgaggacagcctggaagaggcgtactgggatcggtaagcgcgtccctctcccggcggggagagggcagtacatcagccggtgaccacttcgccggccggtggcgtttccagaagccgcagcatggcgcgggcaatttcccgttcgcccatcaccacctgattggctccgcgatcgataatgtagtccacttcgtcatcataatgggcgcgggcgataatctcgatattcggacatttttcccgtgcggaagcgacaatctctccggcctcgtagccgttagggattgtcagcagcagccagcgggcgcagtccagatgcgccagctccatgatctcttcattggcggcattgccgagcaccgcgctgatcccgcgctcgcgtagctcatccacgcgggtgcgcgaggtttcaaccaccaccagcgggatcccctgggccatcagcttctcgcccagcaggctgccgacgcggccgaagccgaccaacagcgcgtggttgcagatatcgaccggcacctgcttctcgtcttccaggacctcttccagcgtctgctcgtcgagggtttcggttttatcgagatatttttccagcagggtaaacagcaccgggttgagcataattgagatgatcgccccggccagcaccagattttgtccggcctgcggcagcaggttaagcgccattcccaggccggcgagaataaaggcaaactcgccaatctgcgccaggctggcggcgatggtcagcgcggtgcgcggcgagtgaccaaacatccgcacaaggaaaaaggcggctgcggatttaccaaagataataatcgccagcgtcgccagcaccgccagcggctgttggaccagcaccatcgggtcaaacagcatgccgacggagacgaagaacagcaccgcgaaggcgtcgcgcagcggcagggtgtcatgggcggcgcggtggctgagctcggattcgttaagcaccatgccggcaaagaaggcgccgagggcaaaagagacatcaaacagctccacggcgccgaaggcgatgcccagcgccagggccagcaccgacagagtgaacagctcgcgtgagccggtggcggcgctgcgcgacatgatccacggcaccagccggcggccgaccagcatcataatggcgataaaggccaccactttgccaatggtgatcccgaggtcgagggccagggacgcgaagccgacgttgcctttctccgccataccggcaatcgccggcagcaggaccagcgtcaggaccatcaccaggtcttccacaatcagccagccgatggcaatttgcccgcgctggctgtcaatcagttgtcgttcctccagcgcgcgcagcagcactacggtactggcggtggagaggcacaggccaaagacgatgccggtcatcagcgaccagccgagggcggcggagagcgccatacccagcagcgtcgccacggctatctgggcgatagccccggggatggcgatcgattttaccgccatcaggtctttaagtgagaaatgcagcccgacgccgaacatcagcagaatgacgccaagttccgccagttccggagccagtttggtgtcagcaacaaagccaggggtgaaaggtccggccagcacgcccgctaagagatatcccaccagaggagaaatacgtagcttattggcaatcatgccgagaataaaagcgagcacgaggccgccgacaatggtggtgataagcggtgttgcgtggtgcattccgtctcctttccagtggtgtatcggtccattttgctaccctgtccgggtaatagtttatgacaaaaacgttcactttgtttatgaataattcttgagttgtgcaaaaaaatgcaattagccgatgaaaaggcacagaagggaaaatggcggggggaaatcgtggaacaggctgatgacacaagggttaacggcggccaaggttgcactttggccgccgaataatcaggctttttgccggttatcaggaaggaatatcgtcaggaatcccagcagcggcaggaaggcgcagattttataaaccagatcaatgctggtatggtccgccagcaggcctaacaccgcggcgccaaggccgcccatgccaaaggcgaagccgaaaaacaggccagaaaccatgccgatgcgtcccggcagcagttcctgcgcatagaccagaatagcagaaaaggccgaggcgaggataaaaccaatgatcaccgtcaaaatacccgtccattcaaggctggcgtagggtaaaacaagggtgaaaggcgctacgccgaggatagaaccccaaatcacatatttacgcccaattttatcgccaacaggcccgccaattaccgtcccggcagccactgcgaacaggaaggcaaacagatgaagctgggcgttttgcaccgttaagccgaatttatgcatcagataaaaggtgtaatagctgctaatgctcgccatatagaaatatttcgagaaaatcagcatcagcagaatgcctaccgccagaataaccttcttgcgcggcagcggattaacgatggccggtttcggtttgcccttattcattcgatgctgcgcggcataccagcggctgatttgcgacagcacgacaatagccagcagagcggccagcacaaaccaggcgacgttgcctttgccgtacggggcgatgatcaccgccgccagcaatgggccaagcgagctgccgaaattgccgcccacctggaacagcgactgggccaggccgtgacggccgccggaggccatccgcgccacgcgggatgattccggatggaaaaccgaggagccggtacctaccagcgcggcggccagcagcaccatgccgaagctaccggccagcgcgaggagaatcaaaccgcagagggtgaagcacatgcccaccggcagcgaccacggcatcgagcgtttatcggtgatgtagccaatcaccggctggaatagcgatgaggtgagctggaaggtcagggtgatcatgccgatctgcacgaaggtaagggagaactccgcctgcagcagcgggtagatagcgagaataagcgactggatcatatcgttaagcaaatgggacaggctgatcgcgcctaagatgccaaacgaggtgcgtgctttttgcggcggcgcagcggggccggacaagggttgagcggattggttggttgtcataggttcacttcagcgagttctatttgttgtagagaatgcaggttgataccctaaataattcgagttgcaggaaggcggcgacgcagcgaatccccaggagcttactcaagtaagtgactggggtgagcgaggaaagccaacgcacatgcaacttgaagtatgacgggtagaattattatccgactaacatacctgttgataaggtttgaaggaagtcgcaattctgaaaacatatttgtcaacgcgactaactcgctatactttcggcacttgggattaagtcagggagtgaagcatgcattatttcaaacacagcgtagcgctggcgctattcgccgctttatcgctgggcagcctgtcggcacaggcctatgagcaggataaaacctataaaattaccatcctgcacaccaacgatcaccacggccatttctggcgcaatgactacggcgaatatggcctggcggcgcagaaaacgctggtcgatggcatccgtaaagaggtggcggcggaagggggaagcgtcctgctgttatccggcggcgatattaataccggcgtaccggagtctgatttacaggatgcagagcccgattttcgcggcatgaacctgatcggctacgacgcgatggcggtgggaaaccatgaattcgataatccgctgagcgtactgcgccagcaggaaaagtgggctaagttcccgttcctgtcggcaaatatttatcagaaaagcaccggcgaacggctgttcaaaccctgggcgttgtttaagcgcggtgggctgaaaatcgcggtgattggcttaaccaccgacgatacggccaagattggcaatccggaatatttcaccgatatcgaattccgcaaaccggcggaagaggcgaagctggttatccaggagctgcagcagaatgaaaagccggacgtgatcctggccaccacccatatgggccattacgacaatggcaaccacggctctaacgcgccgggcgacgttgaaatggcgcggagtttacctgcgggatcgctggcgatgatcgtcggcggtcattcgcaggatccggtatgcatggcggcggaaaataaaaagcaggtcgattatgtgccaggcaccccgtgcgctccggatcgtcagaacggcatctggatcgtccaggcgcatgagtggggcaaatacgtcggccgcgccgattttgagttccgcaacggcgagatgaagctggtgcactatcagctgatcccggtgaacctgaagaaaaaagtgacttacgataacggccaaagcgagcgggtgctgtatacgccgcagatcgccgagaacccgcagatgatgtcgctgctgacgccgttccagaacaaaggcaaggcgcagctgcaggtcaaaatcggcagcgtgaatggtcatctggagggcgaccgcagtaaagtgcgctttgtgcagaccaatatgggccacctgctgctggcggcgcaaatggcgcgcagtaacgcggatttcgcggtgatgagcggcggcgggatccgcgactccattgaggcgggggatatcacctacaaagatgtgatgaaggtccagccgttcggcaatgtgctgacctatgtcgatatgaacggcaaggaggtagtggattacctgaccgccgtcgcgcagatgaagccggattccggcgcttatccgcagtttgccaacgtcagtttcgtggccaaagacggtaagctgaacgatctgaaaatcaaaggcgaaccggtggatccggcgaagacctatcggatggcgacgctgagctttaacgccaccggcggcgatggctatccgaacatcgccgataaacccgggtatgtgaataccggctttatcgatgccgaagtgctgaaagagtatatcgagaagaactcgccgctggatgccgccgcctatgagccgaaaggcgaggtgagctggcagtaagcctgggcttcaggttggctatttccccggtggcgctacgcttaccggggctacgagttgggtatcccggataaggcgcgtgcgccgctatccgggatagttttatcaatcgcggcgggcgatatcggcgaacttcgcatcgagaagctgcgccagatcgctcgccgccagctcaatatccagcccgcgtttgccgccggaaatatagatggtggcaaattcctgcgccggggcgtcaatcaccgtcggcaggcgcttcttctgccccagcggactgatgccgcccaccagatagccggtgatacgctgcgccaccatcgggtcggccatgtcgactttcttagcgcccagcgctttcgccactttcttcaaatccagctgcccggcgaccggagtgacggccaccgccagatgcttcatatcgccgttcacggcgaccagcaaggtcttgtaaacctggtcggcattgaggccgagcttgcgcaccacttcatctccgaagttggtctcattgggatcgtgatcgtaactgtggatctgaaaggaaattttgtttttttcgagtaatttaacggcgggagtcatagctatccttcttaccaaccggttttgcgtgacgtcagaatacgcccgcaggttgtctaaaaaatagtaccatcttgcgcaatagtgttggcagtgatggtcactttgagcgacaatcagacgatccgggatgcaaatcccgggataataataatgatgaaattcctctttgacgggccaatagcaatattggccattttttttatgtcagcatatccggcagattcccttcgccatacaggtgcagcgcgccgacggcaaccacgtagcgccccggcggcaaggccagcagcgtctcgcgccaggcgaggttgcgctggtgcatcagcacatcatataaagactggctaaaggtcgtcggcagcgataccgcgccgcgcgacggcggttgctccagccaccagccgatcatgacctgcagtaaacgggcgttggtgcgccagtgggtcagcgtatcctccagcagcgccatccccccgtcgggcagatcgcgcagcagcgcgatttggctgtcggcgccttccagctccatcaccgctatgttgctctcgcgggcggccatcagcaactgataatcgatgccgtaatctggtcgcagccccagcttctgcgcctgggtggcctgcaggaccatcgccacctgccacagcggctggctgtcgaacagcccgaccgacaggcccagctcgccggttcgcgcctctagctcgctcagctgcgcatcgctcaggcgttccgccagcggtgggtaagtggggagattgctaaacggggtttcattgccgctgatatcggcctcgacgattaacgcatcggcctggcgtatttttttcagaagcttcgccggcggcggcgccatgtcgcgggtgcccatatggatactgccgacgaggtgcaaatagcgttcgccgggcaggacgatatccatcgcaggccaggaataagacgagccgacggcggctcgccacagcatttttatccggtttaacaggcccatacgcgctccgaagtgtgaggacttcatgctagcgcatatggtgatacacgtcacccttccggcgggcttttcttgtcccggcaaaaaaacgggcgccgaacaacgtcggcgcccgtttcatctgacggcgtttactcttttggtttaaagcgcagcaagcggttggcgttactcaccacggtgatcgacgacagcgccatcgcagcgccggcgaccaccgggttgagcagggtgccggtcagcggccagaggatcccggcggcaatcgggatacccagcgagttgtagacaaacgcgcccagcaggttctgcttcatattgcgtaacgttgctttcgaaatcgccagcgcatcggccacgccgtgaagactatggcgcatcagggtgatcgccgcggtttcaatagcgacatcgctgccgccgcccatggcgatcccgacatccgcctgggccagcgccggggcgtcgttaatcccatcgccaaccatcgccactttgtgcccctggctctgcagacgcttaatggcatcggctttaccgtccggcagcacgccggcgatcacttcatcaatgccggcttctttggcgatagccttcgcggtggtggggttatccccggtaagcatcaccagccggtagccctgccgatgcaaacgcgccagggcgtcgacgctgtcttcgcgcagcgggtcgcggatggcgaacagcgcggcggcctgaccatccaccgccagcagcaccggcgtggcgccgcgtgaggcctgggctgtcatctcgctttccacctccgcggtattgatatgctgctcgttgagcagcgcctggttaccgagcagcagacgatgaccttccgcctcgccgctgacgccaaggccgcgcagggtgcggaagccgctgacttccggcaatgggccgtcggcagctttatcaaggatcgctcgcgccagcggatggcttgagccctgctccagcgcggcggcaagacgcagcgcggtatgctcatcaacgccagcgaaagttttcaccgccaccacctgcggcttgccttcggtcagggtgccggttttatcgaacaccagggtgtcgagttcactggcgcgctgcagcgcatcggcatcgcgcaccagcacgccatactccgccgcccggccaacgccggagataatcgacatcggcgtcgccaggcctaaggcgcacggacaggcgataatcagtaccgtggtggcaatgaccagggtatagacgatctgcggcgccgggccgaagaagtaccagatcgcagcgctaatcagcgcaatgacgaccaccgccggaacaaatacggcggagattttatccgccagctggccgatctccggtttgctgctctgcgcctggcgcaccatgcggataattcttgccagcgtggtctggctgccgacggcgctggcggtaaacagcacgctgccatcctgcaccacggtcccggcgtgaatggcgtcgccatcgcctttttgctgcggcaccggttcgccggtgagcatcgcttcatcaaaccaggcttcgccctggcttatcatgccgtcgaccgggacgcggtcgccggtagtcaggcgcagcgtcatgccggcctgaacttccgcgagcggcagatctttctcgccctcgggcgtgacgacccgcgccgaaggcggcgtcaggtcgagcagtttttccagcgctttcgaggagcgctgacgcgcgcgggcctccagcatatggccgaggttaatcaggccgataatcatcgcgctggcttcgtaatagagatggcgggcttccatcgggaaccactgcggccacaggttgacgctcatcgagtacagccaggcgacgccggtgccgagcgccaccagcgtgtccatggtggcggtgccgtttttcaggcttttccacgcgctgcggtagaagtggccgccggcgaagaccatgacggcgagggtgacaaggccgataaccagccacagcgaacggttgtcgtcgctgaccatcatgttatcgccgatcatgccccagaccatcaccggcacgccgaccagcagggcgacaatcgcctgccagcgaaaacgtttcatcgtcgcgagggcggtttcctgctgacgttcgcggcgttgcagatcgtcttcgatcgcctccgcgccatagccggctttctccaccgcctgcactaattctgcggcggacgcactgcccatcaccagcgccgtgcgttccgccaggttaacccgtgcctgtgagacgcccggcaccgcggcaagcgcgttttgtacccgggagacgcagctggcgcagctcatgccgttgatcagcagctgttgactgtcatcttcgtcatgggctgccggaagctcaggagtggccgctgtcagtgcttccgacgggattgatgattctgccagcggtttagcctttgggtggctgagctccgcgccgtatccggcttgtttaacggtatcaatcagcgcttgcgcgctggcgctgcccgtcacatgggcttcagtgagggtgacttccgcttgctcaacgtcaggacgctgctccagactctctttcacgcgtttgacgcagtggccgcaggagaggccatccagcgtcaggtcgatagtgttagacataaataactcctgaataattttccggtcaacgattgaccagacccactctttcatcgagtattaagaaggttaaaccttccagcaaggggaaggtcaaggagaaaaaatgaatattagcgatgtggcgaaaaaaaccggcttaaccagcaaagcgattcgtttttatgaagagaaggggctggtgacgccgccgttgcggagcgaaaacggctaccgcacctatagtcagcagcatctcgatgagctgacgctgctgcgccaggcgcggcaggtggggtttaacctggaagagtgccgcgagctggtggccctgttcaacgacccgtcgcggcacagcgccgatgtgaaaaaacgcacgctggagaaagtggcggatatcgagaaccatatccgcgagctgcaaaatatgcgcgcgcacctgctggcgctggccgaatcctgccccggcgacgacagcgcggagtgcccgattatcgataatctttccggctgctgccatcgcaaggcgcaggcttaacggacggcgggtctgattcgtagcgtaatcccttctacggcaatcacttcaaccttgctgcccgccgcgaagtcttcatcggcaatcaccggccaggagctatcgcccacgcggacgtggccgcggccgttcaccagcggggcatccagcgtcaggcggcggcccaccagttgctgcccgcgctggttgagctgggcatcggccgggcgctgcgttttgacgcgcttgcgcagccatttcgaccacagccacgccgccagcagggtgagaacggcaaacagcgtgccttgccattcccagctcagcggcaggagccaggtcagggcgccggtcaccacgccggcgacgccgctccacagcaggtatccgctgccgcccagcatctcggccgccagcagcagcccgccgaggcttagccagaacagatgggggtgtgcgaggatcatgccgatcatgattttttccgatcgccagcgccttctttgatcagctcgctgatcccggcgatcgatcccatcaggctgctggcatccagcggcatcaataccactttgctgttgttagcggcgccaatttgctgcagcgcatcggtgtatttctgcgccacgaagtagttgatcgcctgaatatcgcctgaggcgatcgccgaggagaccatttgggtggcgcgggcttccgcttcggcggaccgttcgcgagcctccgcctgcaggaacgcggactgccgttcgccctcggccttgaggatctgcgactgcttttccccttccgctttcagaatttccgcctgtcgcaccccttcggcctcaaggatgtacgcgcgtttggtacgttcggctttcatctgggcgttcatcgaggcgataagctccgccggcgggcgaacgtcgcgaatttcgacgcgggtgattttcacccccacgggttggtggcgtcgtcaacgatatgcagcaggcgggtgttaatgctgtcgcgctgggagagcatttcgtccagctccattgagccgagcacggtacggatgttggtcatcgtcaggttgacgatcgcctgctcaagattgctgacctcgtaggcggcctttggcgcgtcgatcacctgaataaaacagaccgcgtcgatggtgacgttggcgttatcccgggagataacctcctgcgaggggatatcgagcacctgctccatcatgttcactttgcggccgatacggtccataaacggcacgactaagcttaatcccggctgcagcgtctgggtaaaacgcccgaagcgctccaccgtccactggtagccctgcgggacaattttcaccgccgcggccacaataaccagcgcgacgaaaataaggataggaataaaaatcagcatcaaaaacctcctgtcttgttgcctggcggggcgctacaaggaaatagcgcatgtttaaactgagtatatctttctcctcatcctggagaaaggaaagtgcggtaaactagcggtgtttcagaaaataatcaggaagactcatgaaggaaaataacgcgcttttgcgtctcgacggtgtggggtttaagaccgacgacgccgttattttacacaatattagttttcagcttcgcgccggagaattcaagttgattaccggcccttccggctgcgggaaaagtaccttgctgaagattatcgcctcgctgctcagcccaacctccgggcgcctgttcttcgacgatgcggatgtcgcgacgctgtcgccggaaaggtatcgccaacaggtctcttactgcgcgcagacgccggccctgttcggtgattcggtttacgataatctgatttttccgtggcagatccgcaataaacaaccggatccgcaggcgctgctggccgacctgcagcgctttggccttgacgaaaatatgctggaaaaatccattaacgaactctccggcggggaaaagcagcgcgtatcgctgatccgcaatctacaatttctgccgcgcgtgctgctgctggacgaaattaccagcgcgctggatgaaagtaataaacagaatgtgaatgaaattattcatggctacgcaacggaaaaacaggtcgctgttctgtgggtcacccacgatcgcaatgaaatttcgcatgccgatgaagtgattacgctgcaacctgccggcggaaatatgcaggaggtacagcatgaacgggcataacattacgaacgaatcgctggcgctgtcgatggtgctggtgctgatcgctattctggtcagctatcgggaaaagctggcgctggaaaaagatattatctggagtatttgccgggcgatcgtgcagctgataatcgtcggctatgtgctgaaatatatctttaacgtcaatcatgcggttctgacgctgttgatggtgctgtttatctgctttaacgcggcgtggaatgcgaagaagcgcagtaaatatatcgacaaagcttttatctcgtcgtttatcgccatcactactggcgctggactaacgctggcggtactggtgttttctggctcgatcgccttcgtgccgatgcaggtgatcccgattgccgggatggtggccgggaacgccatggtggcggtggggctgtgctacaacaatatgggccagcgcttcagcagcgagcagcagcagattcaggagaaactgagcctcggcgcgacgccgaagatggcctcagcgcggctgattcgcgagagtattcgcgcgtcattgattcccaccgtcgattcggcgaaaacggtcggtctggtgagcttgcctgggatgatgtcggggctgatttttgccggtattgacccggtgaaggcgattaagtaccagatcatggtgacctttatgctgctgtcgaccgccagcctgtcgacgattatcgccggctatctgacctaccggaagttcttcaacgcccgccatcagctagtggtgacgcagctgaaaaagcgcccgtgaacgatcccgggttgcggcgttcacgccttacccgggctacttaggctacgttccgcatagttcgcgtagcccggataagcgcagcgctatccggggaaggcaacggattagtacagcagcgaatagagctgacgacgatatttggcggccagcgcatcgccagtaccgagggcggcgaggatctcctgcagcatcttgcgcgcctggccatcgccggcgcctaaatctttctgcagatggctgaacagcagggccagcgcttcttcattacgcccgacctgatgcagctgcagcgccagctgggaggccaactgcgcatcctccggattctgttccacctgctgctgcagctgctggatttccggggtgtcggcggcctgtttgagcaactcaatctgcgccaccagaccctgatagtgggtatcctgatcctgcagaggaatggttttcagcacgctttccgcttcatcggaacggtgtagagcaatcagcgtttccgccagcagcaggccaatctggctttcctgattcgacagctgccaggcttccttcagcagcggcagggcatcggcgtatttttcttcctgcatcagggccagcgcctgctgagctttcagctcctcttcacggggcaggactttatccagcagggcgcggatcgcttcttccggctgcgggccttcaaaaccatccaccggctggccgttctggaacagataaaccgtagggatggcgcgcagaccaaactgtgaggcgagcatctgctcggcgtcgcaatcgaccttcgccagcgtgaactggccgttgtattgggctgccaggcgctcgagcaccggggtcagctgttcgcagtgctgactgcgggcagaccagaaataaaacagcaccggaacgttcatggactgctgtagcgtctgctgcaggttcgcttcgctaatgttgacaatattctgttcggacatgggcatttctcgttagtcgatttctgttttacatgggggcggcattccgcgcttcaactcagccgtggataattttgtccatcgcgcgggcaggcagcaggcgcttaagcagcgccaccgcgtgggtgaccagggtgaccggatagcgcagctttggtttatcgctggtaaaagcatggcgcactttttccaccaccgcctccggcccgagggtaaagcgggcggcgatgcccggattttctacgggcttatcgctttgcgtctggttgacgttatcggtaaagcgggtgcggatcgggcccggttcaatcaggctgacctgaataccgctgtggcgcagctccatgcgcagcgcgtcggaccacgcctcgagggcatatttactggcggcataggctccgcggccgggactggcgataagccccatcaccgaggaggtcatcacgatgcgcccttcgccgtgcggcgtcatcgccggcagcagcagcatggtgagctgatgcgcgccgaaaaagttagcggaaaattgctgttccatctgctggcggctgatggtgttcagcgggccatagacgccatacccggcgttattgaacaggccgtagagacgattatcggtcagcgcaatcacctccgctgccgcgcgctccacgctctgcgggtcatccagatcgagcaaaataccggttagccccagatcctgcatccgcgcgacatcctctgctttgcggcaggccgccagcacgcgaaagccctggcgggttaaatccagcgcgctttccagaccaattccgctggaacagcctgtcactaaaaccgttttttgcataactttacctgtcagcgacccctggcgttcaggagtcatgattaactaagggagccagccgcttagccatccagtcggcgataaacggctgcgcgtcgcgatttgggtgaatgccgtcgtcctgcatccattgcggcttgagatagacctcctccataaaaaagggcaggagaggaatagcgaattctttggccagggccgggtaaatcgcgccgaaggcttcattatagcggcggccatagttcgccggcaggtgaatttgcatcagcagcggctcggcgttggccgctttgatatctttaataatggtgcgcagcgtctgctcggtctgctgcggcggaaaaccgcgcagtccgtcattgccgccgagctcaaccagcacccagcgcggctggtgctgcttaagcagcgctggcaggcgagccaacccctgctgcgaggtatcgccgctgatgctggcgttcaccaccggcgttttcgcctgccactgctcattgagcagcgccggccaggcggcgttggccgccatccgatagccagcgctcaggctgtcgccgaggatcagcagcgtgtccgccgccatcgcgcggcaggtaaacaggaacaacaacaggaaaggcacatgccagcggaaaacatacttgaagttcatcatcttaagaagtccgtcggtcagggggagcatcagctctccatccttaccggagttgagctggttgtcaaaccgcggcagaccatcgccctgatcggcgagtcgggttccggtaaatcgaccctgctggcgatcctcgccggcctcgacgatggcagcagcggggaagtatcgatgctgggcaaaccgctgcaccggatggatgaagaggcgcgggcggcgctgcgggcgcagcacgttggttttgtttttcagtcgtttatgctgatcccgacgctcaacgccctggagaacgtcgagctgccggcgctgttgcgcggcgccagcgatagccagagccggggcgatgcccgcgcgctgcttgagcagctgggacttggcaaacgcctgcaccacctgccggcgcagctctccggcggcgaacagcagcgggtggcgctggcccgggcctttaacgggcgcccggccattctgttcgccgatgagcccaccggcaacctcgatcgccagaccggggacaaaattgccgatctgctgttctcgcttaatcgcgaacacggcaccaccctgatcctcgtcactcacgatccgctgctggcggcgcgctgcgatcgccgtctgcgcctggtggatggccagctgcgggaggaagcatgatcgcccgctggttctggcgcgaatggcgctcgccgtcgctgctgatcgtctggctggcgttaagcctcgccgtggcctgcgtgctggcgctggggtcgataagcgatcggatggagaaaggccttagccagcaaagccgtgagtttatggccggcgaccgtacgctgcgcagttcgcgcgaggtgcccgccgagtggatcgcacaggcgcggaagtcagggctgaccgtcggcgagcagctgagctttgccaccatgacgttcgccggggatacgccgcagctggcggacgttaaggcggtggacgaccgttatccgctgtatggcaccctcgagacgcagccgccggggctgaagccgcaggcggggagcgtgctgctggcgccaaggctgatggcgctcctgaacctgaaaaccggcgatacgattgacgttggcgatgccacgctgcgcattgccggggaggtgattcaggagccggatgcggggtttaaccccttccagatggcgccgcgactgatgatgaatatggccgacgtggcaaaaaccggggccgtgcagcccggcagtcgcgtcgcatggcgatataagttcgccggcgacgctgaacagctggccaattatgagcagtggctgctgccgaagctcggcccggaacatcgctggattggccttgaacaggacgacagcgcgctgggcaaatctcttgagcgctcgcagcaattcctgctgttatccgcgctgttgacgctgctgctggccgtcgccgcagtggcggtagcgatgagccactactgccgcagccgctatgatctggtcgccatactcaagacgctgggcgccggaaggtcgcagctgcgcaagcttatcgtcggccaatggctgctgctgttgacgctgtcggtgataaccggcggggtggcgggcctggcactggagcgtctgctgctgctggtgctcaaaccggtgctgcccgccgcgttacccgctgccagcggttggccgtggctgtgggctatcggggcgacaggcgtcatttccctgctggtgggcctgcgaccctatcgactgctgctggcgaccctgccgctgcgagtgctgcgtcaggatgtggtggctaacgtctggccgttgaaaatctggatcccggcggttagcgtcgtggtggtgggcctgttggcctggctgctgggcggcagcccgctgctgtggtcggtgctggccggggcggtggtgctggcgctgctgtgcggcctggtgggctggggattgctgtggctgctcaaacgcctgacgctcaaagccttgccgctgcgtctggcggtgaaccgcctgctgcgccagccgtggtcgaccctcagccagctggcggcgttttccctgtcgtttatgctgctggcgctcctgttggtgctgcgcggcgatctgcttgaccgctggcagcagcagttgcccccgcagagcccgaactactttctgatcaatatcgcccctgagcagatagtgccggtgaagaccttcctcgccgaacaccagacgcgggcggcggaattctatccgatcgtccgggcccgtctgacgcagatcaacggtcaatccacggacgggaacaaagacgaagcgctgaatcgcgagcttaatctcacctggagcgaacagcgtccggatcataatccgctggtggccggcagctggccgccgaagccgggcgaggtatcgattgaggaggggctggcgcagcggctggggataaagatcggcgatacagtgacctttaccggcgatacccaggagttcagcgcgaaggtcagcagcgcgcgcaaagtagactgggagagcctgcggccaaacttcttctttattttccccgccggggcgctggacgggcagccgcagagctggctcaccagcttccgctgggataacggtcccgcgatgttgacccagctgaaccgcgagtttcccaccgtcagtatgctggatatcggcgccatcctgcgtcaggtcggccaggtgctctcccaggtcagccgggcgctggaggtgatggtaggcctggtgacggcctgcggcgtgctgctgttgctggcgcaggtgcaggtcggtatgcgtcaacgccatcaggagctggtggtctggcgcacgctgggggctggaaaatcgctgctgcgcgctacgctgtgggcggagtttgccctgctggggctggtttccggcctggtggcggcgataggcgcggaagtggcgctggcgatgctgcagacgaaagtctttgattttccctgggcgccggactggcgcctgtgggtgttgctgccgctgacgggagcggtgttgttatccctgtgcggcggcgggctggggctgcgtctgttaaaaggaaaagcgctattccgccagtttagccagtaagaatattgcattttgatgatgcgccgccgtttttggcggcgcttttattttaaacgcacaaattgataaatcattgatttttaagagcacaaaacattaaaaacccaacaacacgctatgctgattcgcggttaatattcaactggaaaatataaggtggcttattaatcaaggaaaaactatggcacacacaataaaagcgctggcgatctcgatcggcgcagcattagcgttaacgtcattgccttcccacgcggagattacgctgctgaaacaagatccgcaggcgggcgatccgttaagccggcttaactttaccgtcggcggcagtatccggccgcagttcaacatgatgaccggcgatggcgacaaaggctcctataagcgtaacggttttgacggcggcacccgcttccgcttcgcggcggattactacctgttcgatgatattagctggatcagctactatgagctgggcgtgaacattccggcgctgtttgactgggataaccactacgcggaaggcgcgaacaataccacccgccgcatgctgtataccggcctgaaaagcgatacctggggtacgttaacctacgggcagcagaacagcatttactatgatgtggtgggggtgaaaaccgatatctgggactacgatatgatcggtcaggccccggggaacggtattaatggcgattacgatggctcctatcgttcacgtaatatgctgaaatataagaaaactgtaggtgatgtcgatctttacggctcttatctgttcgaagacagcgaatacctgccgggtaacggcctgcgttacaagcgtaaaggcggtggttctgttggcgcggactaccacatcatgaaggatctgacctggggtaccgcgtggaactacacccgcgccgaaatgcgcgacccgtcaagcgccgacagcaaaacctatgaccagaatatcgtcggtaccgcgatgagctggaccccggataactggaccttctccttcggcggcggctggtatcagaacttcctcaccaccaagaaaaccgatgtgcataattactttgccggtgacgcctgggggattgaatattttgcgggctataaattcccgatcaatcaatacgctgttaaatctattcagccgtactttatgggcgaccgtctggaatatgtgaacggccgcaactaccagcgtatcgataacggtctggggattagcttccagctggattacggtttccgcgttgactacgaacacgtgtttacctccagcaccgacaaccttggcgatatgaacctggtccgtctgcgctacgacttctaagcggtcacaactccccggtcgcgcgcgcttaccgtggctacaaatcgcgccgaccggtagcccggctaaggcgtttacgccgcaagccgggacaatagagcatgcgattacttcgccagccaggctgcgacctcctgccagctgccgcgaaagagaattttcccggcttttttccccaactgatagcgatacatcgggtcgtagtattcttccagcagcggtaccagccaggcaaagtgcgcctcggtgctggcggtgcgctgctgctgcaccagcgcctcatcgagccgttcagtgagctgagcaaaacgctgcagccccaggcgacggcggatggcaaacaggccgtgatgcagatactcgccgtatgcctgccagcctttctcttcgccatacgcggcgataaagtcgcgatacatgcgatcgaaatactcttcgcgcagccgttcgaggcgaacgtcaaacggatcttccaccaccgccagcggcgactgcgccatgcggaggcgcaggctctccggtagatgattggcgccgatcatatggccttcatcttccagcacccagcgggtctgctgttcggcttttttaagcaggctgaccgccaggtggttttcaaaggtggcctgcggatgctgatcctgcagggttcgaccgaatgaagaaccgcggtgatgagcaagcccttccaggtcgataccgtccgggcgcgagcaaaccagctgagttttgccgttgccggtacagccgccaatcagcacgatcgggcgctgcaccagttcgtcggtggcctggatcgccgcctggcgtagcgctttatagccgccgacgatcagggggtaatccacgccagcttctttcagccactgctggacgatatgcgagcgctggccgccgcgggcgcagcacaggtaaccgtgcgggtaacgggcgcacgcttccagccacgcctgagtacggctggcgcgcaggtcaccctggaccagtttatggccgagcgccagcgccgcttccggcccctggcgcttgtagcaggtgccgaccgcggcgcgttcttcatcattcatcagcggcaggttgatcgccgccggcatcgcgctttggctaaactccaccggggcgcgtacgtcaatcagtggcgtatcgctggcgagaatggcgcgataatccgtcccattggtcatggggtatcctctgaagtcaaaacagaaatgagctttacagcaagggggggattgtacgcgcctcaaggtgtgccggggaaggggatagatcaaatccccggcacgaagggcttagctgagctgcgattgcgcccacaacaggccgctggtgtactccggcggcagcagcggcttgatcgcttccagcgtcgcgctcaggcgatcggtatcgctgtcggtgaggttcaggtggccgactttacgacccgggcgcacctctttgtcataccagtgcaggtgcaccagcggcagcttcagccagtcgtagttaagatcggtgccgatcaggttgatcatcaccgacgggctgttgaccaccggcggcggcagcggcaggccggtaatcgcccgcagatgcagctcgaactggctgatagacgccccgttctgcgtccagtggccgctgttgtgcacccgcggcgccagctcgttaatcagcagcccctcggcggtaacgaagcactccatcgccatcacgccgacatagttcagctcgttcatgatcgccgtcagcatgctttccgcctgttcctgctggcgagcgttggcctgcgggaaggcgacgctggcgcgcagaataccgtcctgatgcaggttacgggtcagcgggtagaagacggtgctaccgtcatgagcgcgggcgcctaccagcgatacctcgccggagaagttaatcccctgctcgacgatgcactcgccgtagttatcggccggtagctgatcgatctcgttttcccgcagacgccactggccgcggccgtcgtaaccgccaacgcgacgcttaacgatcgccagttcgccaaggcgagcaaacaccgccggccactcgcttttatccgccagcagctgccacggggcggtggcgaggccaagcttgtcaaacagctgcttttgcgtcaggcggtcggcgataatcgggaagacatcgcggttgacgaacgccgggtggcgggccagctcgcgggtgagggcggtttccggccagcgttcaatttctgccgtgatgacgctctgctggaacggcaccgcttccgggtcggcttccaggccgaccggccaaacggcgatgcccagcggctcgccggcctggcgcagcatacggcctaactggccgttaccgagcacgcatacctgtttcatgccgcaccccgcggatccggattatccagcacttcatcggtttgcgcctgacgccaggcgctcaggcgctggtgcagttcagcatcgtgctgggcaaggatctgcgcggcgagcaggccggcgttcgcagcgccagctttgccgatggccagggtaccgaccggaatgccgcgcggcatctgcacaatggagtagaggctgtcgacaccgcttaaggctgcgctctgaaccggtacgccgagcaccggcaccagggttttcgccgcaatcatgcccggcagatgcgccgcgccgcctgctcctgcaataatcacctgataaccgtggctttcggcgctttcagcaaagctgaacagcttatcgggcgtgcggtgggcggagaccacttcgacatggtacggaacgttcagggcatcaaggatttctgcggtaaattgcatggtagcccagtcgcttttggaccccatcacgatggcgatacgcgccgaattattgcgggaagacatgcgtcttaaaactcctgtgggtgtgtttcacactgctttagaggccacagagaatagcatgaactgccagcaaggaaaacggttgcgtgcgcatggttagccgtcttttgtctcgcctggaggtgatggcgtgagtgcctgattgacctttatctccctcatgatacaggtgataagcagcactaacccccacgggagcatcagggtgcccataagcagtaaatagatttgtaccagccggctatcgtgagggcgggtgcagagcaaataaatggcataaaaatagatagcccacgccagcatcgcacaccagacaaacgtcagcgtgttgccgataacgacgccgattaaggcgatataacttacccctaacggattgaggatcgcgatgatcattccccacgtcagcggctgactccactttttcctgctcatgctcgttccttgagagtgacgttgtggaagactagcatgcagggcggggggaagcgcgcaccttcgcccgggcaaaaggcgctttcggaattgtgctcgcgcaggaatcagaacggaaagtggattagtttgacgtcgtccggcgtcaccttgaccatcgaaccttcgctgtgccaggcgccaagtaccacacgccatgcgggttggccgttggcctgcagttcatggaccgccgggcgatgagtatggccgtggatcagccactgcacgtgatgccgctccattgcgtcaactaccgcctgtggattcacatccataatttccattgatttactgctgttggcggctttgctgtcggcgcgcatgcgggcggcgatgcgacggcggataaacagcggcagggccaggaacagacgctggatccacggggtgtggactttggcgcgaaacgccagatagccttggtcatcggtgcacagcgtgtcgccatgcatgatcaagacttcacggccatagaggtccagtcgctcttcttcggcgagcaggatcatcccgctctggcgggcaaagcgctggccgacgagaaaatcgcggttgccatggatgaagtagcacggcacgccggcgtcgacgacggctttgattgccgaggcaatttgttggtgcagcgggttaggatcgtcatcgccgatccatgcctcaaacagatcgccaaggatatacagagcgtctgcctggcgggcttcgccctgtaaaaaacgcagaaaaccggcggtgatcgccggttcttctgtttgcaggtgcaaatctgcaataaaaagtgtcgccacgaattactcgctgacggtgacgcttttgatgatcacatcatctttcggcacatcctggtgcatgccgctgcggccggtggcaaccgctttgattttgtcaaccacgtccatgccttcaaccacttccgcgaagacgcagtagccccaaccctgcaggctttcgccggagaagttcaggaagtcgttgtcaaccacgttgatgaagaactgcgcggtggcagagtgcggcgcctgagtacgggccatcgccagcgtgccgcgggtgtttttcagaccgttgttcgcttcgttctgaatcggagatttggtcgctttttgtttcatgccaggttcaaaaccgccgccctgaatcatgaagccgttgataacacggtggaaaatggtgttgtcgtagaaaccttcgcggcagtagtccaggaagtttttaactgtttccggcgctttgtcgtcaaacgttttgattacgatatcgccatgattggtgtggaaagtaaccatttttgcatcctgttccgatgagtgtggtgccagcacccggtgtcgggtgagatataggggggtgttatagcataaccgcgggggtcgatgcaccttgcaatgtgtgctgcgtccggtctgaattatgggtattatagagacttcattacccacacacgtctacacggaatcttcgatgttaaaaatttttaatacactgacgcgccagaaagaggaatttaaacctatccatgccggggaagtcggcatgtacgtgtgtggtattaccgtttacgatctctgtcatatcggccatggacgtaccttcgtctcctttgacgtcgtggcgcgctatctgcgttttctcggctataagctgaagtacgtgcgcaatatcaccgatatcgacgacaaaatcattaagcgcgctaatgaaaacggcgaaagctttgtcgcgctggtcgatcgcatgattgccgaaatgcacaaagattttgacgcgctgaatattctgcgtcccgacagcgagccgcgcgcaacgcaccatattgcggagatcattgagatcaccgagcagctgatcgccaaaggccatgcttacgtggcagataacggcgacgtgatgttcgacgtgccgacggacccgaactacggtttgctgtcgcgtcaggatctcgatcaactgcaggcgggggcgcgcgtcgacgtggttgacgtcaagcgtaacccgatggacttcgtcctgtggaagatgtcgaaagagggcgagccaagctggccgtcgccgtggggcgcgggccgtccgggctggcatatcgagtgctcggcgatgaactgcaagcagcttggcaaccacttcgatattcacggcggcggttcggatctgatgttcccgcaccatgaaaacgaaatcgcccagtccacctgcgcccacgacggcgaatacgtcaactactggatgcactccggcatggtgatggttgaccgcgagaagatgtcgaaatcgctgggtaatttctttaccgtccgcgacgtgctgaagtattacgatgcggagacgattcgctacttcctgatgtccggccactatcgcagccagctgaactacagcgaagagaacctcaagcaggcgcgttcggcgctggagcgtctgtacaccgcgctgcgcgggacggacaaatccgtcgacgcggcgggggcgaagccttcgaagcacgctttatcgaggcgatggacgacgacttcaacaccccggaagcctattcggtgctgttcgatatggcgcgtgaagtaaaccgcctgaaaaccgaggacgcggccgcggcgaacgccatggcggcccacctgcgtaagcttgctgcggtgctgggtctgctggagcaggagccggaggcgttcctgcagagcggcgcgcaggttgacgacgcggaagtggcggagatcgaatcgctcatccagcagcgtctggacgcgcgcaaagcgaaagactgggcggcggcggatgcggcgcgcgaccgtcttaacgagatggggattgtgttagaagacggcccgcagggcaccacctggcgccggaagtaagccataaaaaaacgcccgcaaaagcgggcgtttttcttttcgttgtcaggccgtgacggttacgctctggccttcaaagctcaccgtctgaccagcgacgattttgcagcgtttgcgggtttccaccgcgccgtcgacttttaccagcccgtcggcgatggcgatcttcgcctgggcgccgctttcgctccagccttccagcttcagcagatcgcacagctcaacgtgcggatgtttacctaaggaaaatgtcgccatctcaggcctcctcaacgtcgtgatactcttcgcacgcctgcagcgtgttctggatcagggtggcgacggtcatcgggccaacgccgccgggaaccggggtgatgtaggacgcgcgttcggcggcatcttcatacaccacgtcgccgaccactttgccgctttccagacggttgatgccgacatcgaccacaatcgccccttctttaatccactcgccaggaataaagcccggtttgcccaccgcgacgatcagcaggtcggcgttttcgacatgatggcgcaggttttttgtaaagcggtgggtgacggtggtggtgcagccggccagcagcagctccatgctcatcgggcgaccgacgatattggaggcgccaatgaccaccgcattgaggccgtaggtgtcgatattgtagcgttccagcaaggtcacgataccgcgcggagtgcacggacgcaggcgcggcgcgcgctggcacaggcggccaacgttgtaaggatggaagccgtcgacgtctttatccggcgcgatgcgctcgagaactttgacgttatcgatccctgccggcaggggcagctgaaccagaataccgtcgatggtcttatcggcattcagagtgtcgataagctccagcagctcggcttcgctggtggtttccgggagatcgtaagagcgggagacgaagcccacttcttcacatgctttgcgcttgctgccgacataaatctgcgaggccgggttgctgccgaccagcacgacggccagcccaggggcgcgttttccggccgcaacgcgagccttcactttttccgcaacctcagagcgtacctgctgcgcaatcgttttaccgtcaataatttttgctgccatcagagagaggattccatctgtatctttacgaaagggggatgaggatattttgtcagaagcgggcctcgctgtcagtcctcgtttgctgttttatcctgtctgaggctaatttagcctgttatggccatagttattacatggttataagtgcgttgcgcctggccactgagtcgatttacgcgcgcattaggcccggcggtatgcttcttgtacagttggtggaggatatttcgccagcgtcgtataagccccgcagtttcctggcaaaatggattgactcaaccgacgtggaccgtataattccacgcgtttcactccgcgaagcactcgcttctcagggcgcccttagctcagctggatagagcaacggccttctaagccgtaggtcacaggttcgaatcctgtagggcgtgccatttaataatcaatcacttatcaacttcctccagtcgctgatttttccttgtgggacatatttgggacatcttctgcaaaaatttgcaaaaattgagtcaatttgacgtgcgtgctcagttaaatggttaggtgccaggtgagcatatcgacggaccatttcgatgattctaatgtcttgtagtatctgtcggacgatggccagtcagagtacagcattactgctctgtaatatcgaacagaatggttaatgctggttatagctgagtgcagaataagcgctctgcaggaatgtgaaaatatgttgccggtaacaggctaatagtcattatagctttaggttctgtctgactgggttaaatatcgcattttaagctggcgtgaagtacagttgttatagatcaatattgaacactatttgaaagcataccctcgatgttcatccactacctggaaagatccgaatgaacatcaaattcgtcgccatctccgtattcgctgttgtgtgcgtctttgcatcagatatttccatcgccaaatcgaattccttaagcgatgatcaggtcagtcaaaggattattgatgactctgtcgcatcctaccccggtacttgtgcctgtcccttcaataccgcccggaacggcagctcgtgcggtggccgcagtgcctggagcaaagctggtgggtactcacctatttgctacaagaaagaggtaacaaaggagatggttaaggcgtggcgacaagagaatcaatgataacgatcaatatctgaaccaggtgattacttacactggaatagtagtttaaataatattaaatgattatttcgaatactgcagcccatttgcagtaagcactgttctggtagaggcggcagaggccacggcgtatatctttttaccttgtgatatttgaacccagcaaatctatttcccctgcctgatagacttagtgtcaccgtatcctgttactaagagcacggggctacctactcataagacacttcctcttcttacgaggaaaccggttcagcgtgttgtgtgtggagacagtacccatcaactcaaactgataacaaaaagtttaatttttttccccgccgcgctgactatagttagggcactttcacttgcccaataaggtcacgattatgaaattagttatcgcctccgtaatttctctgctcagcttcagcgcgctggcggcgccagaggggacgctcagcgtacacattcttaatcagcaaaccgggctcccttcaccgggggtgcagattgagctggataaacagcagggggagagctggcagcatatcgccaccggtaaaacggatgccgatgggcggattaaatcgctctatccgcaggcggagaatatggagccgggggtgtataaagtgacgtttaaaaccggtgactattttaaaagccaaaatatgaatacgttcttcccggtgattccggttatttttaatgtcacaaagcaaaatcaaaaactgcatatcccgctgctgctcagtcagtacggatactctacctaccgcggcagctgatgacccaagccgctatccagccaacgcctgcgcggcttccgcaggcgtcacgcttttctcgcaccacgatgtccacgcctaacgctcggtctctttctctttaaagtgtttaacggcttcgtcgtacatcgccagcaggccggaaatttcgccttcatattgcggcacgcgctgggcgcgaacgagctcaatcagcagcgcataggctgcttcttccggggccgcatgtggattgatcagtccagacatatcacctccttaacagtgggcctttagcctacccctcggcgggaaaacgcaacagcctgatatgcaaccagtacttcttatatggctcttatgaaacctcagaggcgaagaccacggcggaaatcaattgaaggaggggttatccagaccactggcgtggcggttagcggtgcatctacaccggcaggaggctcatcatcagccaggcgatggcgatgcagataagggtcatcgacagcacaaaattcatggtagctcctcttcatcctttctttactcaacgtaaattttgacagcgatgatcgcctttatccttggcgatttgtgccgctatccggcggtgggctggggaaagacggcctgtttccccgtgaaggccagcaaaatatcctctttgtcagggttatagtgatgacatcaatgaataagctgcatcacattggttatgttggtctttccgcctgaagaatgacttcgggtcgctgataagcttgctgggggactaacaggatgagcactacaccgttaacgctttcttttgccggacaacaaccgcccatcgccctgccgcaggtgtcgggaacgcgggggccggtgggagtcgacatgcgcgggctaaatcagtccggattctgcagctatgaccccggcttcgccaataccgccggatgccagtcggcgatctcgtggatcgatacggaaaacagcgtgctattgcaccgcggctatccggtggatcagctggctcgccagtgcgattttctcgaagtggcctacatcatgctgaacggtgacgcgccggatgaggccagctatcaaacctttcgcgagaccatcacccgccatactctggtccatgagcagatagcccgcatgtgcagcggctttcgtcgcgactcgcacccgatggcgctgatgtgcgccctggtgggggcgctggcggcgttttatcatgacgtcctggacgtggaaaatccgcagcaccgggcgctggccgccacccggctgctgtcgaaaatgcccactatcgccgccatgagctacaagtacaccattgagcaacccgcggcgtatccgcgcaacgatctctcctatgccggtaatttcctgcagatgctgtttgctatcccggcggaaaaatacgttctcaatccggttatcgagcaggcgatgaaccagatcctggtgctgcatgccgatcacgggcagtgcgcctcgaccactacggtgcgcgcggcgggctcctccggggcgaacttattcgcctgcgtcgccgccgggctggcgtcgctgtgggggccgatgcatggcggagcaaatgaatcgagcatgcgaatgctggaggagattgaaagcgtcgatcaggttccggcgtttctgcgccaggcgaagcgcgatccgcaggcatttcgccggctgggttttggcaactcgcgctaccgtcaccgtgacccgcgcgccgatatcctgcgtgaaaccagccatcgggtgctggcggaggtaggcatgtccgaccgcctgctgcaggtggcgatggcccttgaggacgtggcgctgaccgacccctattttgtggacaatggcctgtcgccaagcgtggatttctataccgcggtgatccttaaagcgatgaatctgccttcgtcaatgtttgcggtggtcaccgcggtcggtcggacggtcgggtgggtggcgcactggaacgagatgcaccaggcgccgctgaccatctaccggccacggcagatttacgttggcgagggctatcgggattacgtctcccgacgcggcgagcggtcaacgggcccgcagtgactgcgggcgaagcgaacgccagcgcgaccttcgtggtgacttataactgatctgcctggcggcgcggcgccgtcaggcatgcgccagtaaaggaaacatcaacttcctgtctttaaacaggttttccttctggtcatagacgaagaggatatcttctccctctatcttctcatactcgccgagccggtcttcactgggggtaaaaccgaggatggcctggtaaacgtggtcatcggccagttcgttgaccagcgtcgacaggctcttgcccacgtcgcagaatagatcaaagcagatcagcaccggaccgttttgcatggcgatgaccaccgcctcattttttgccgagtaatagacaaaatgcttcataaaggctgagcagtaaaacatcagcaggccaaagttatgctccacccgcagcggtgagaacgggttggatttttcatagtaatggcggagcagggcgacatcgtcagggctgtccatatccagtttacgaaaatcaccggctcgcggggagaccggcataatatattgatactcttcgctgcgggtgaagccaaatttggggtaaaaatccaccgtggtgggattggcgaataaaaagaaggcgtccgcctcctgctgccagtcctgcaggatgtgatggataagctggccggctaatcccttattacggtggtccggttcggtcatcacggtgccaatctgaatataacgccggggctcgccctgccagcgcaggtcgatgatgttggccgaagcgttagcgataactttattgcgttcgacaaaagcataggggatataggcgtcggtccagtaaccttgctgataccactcttcaaaagacaggtcaaaagtcttaacggcaaggtcaatgaagctttttcttaatgggttattttctctgacttgcttcactaattgataattcattgtcatagttccttctcactatggcttctgaaagcggcgacgtcggcaaaggcacttgcgtcgaatgagcgctgtaaacgtagcatatctgggaaaaggatccgcaatgtcgatgcttaacctttgccccagtcacaaataaccgcatgctggccgtgtcaaaccgggcgaaacggactgtttgcgttcgctatcgccataataaagcgtgagtaaaagaggtattggtcgagaggctgaggcaaatgtactggctattttatcgacaattggccgagccgtagaggttaggtttatttatttatgcattaaacaggaaattttacgcgttgcgtctaataatagagtagtccccagcgtaagggctgaatttatcctggaatcggcttataataacgcgctttgtgattgagtattaccgcacgaattggaaaaatactacgtgcaggatccgctactttatttcgcggtttttgctcagctattattgagtgaattaacaggattactatgtcaaatttacccaaattttcccgcgcgctgttgcacccgcgttactggctgttgtggctgggaattggctttttgtggctgctggtgcaattaccgtatccggtgatctaccgtctgggaacggcgcttgggcggctggcaatgcgggtgatgaaaagccgcgcgcggattgccagacgtaatctcgaactctgctttcccgagatgagcgccgccgaccgcgaggcgctgctggtgaaaaactttgaatcgctgggcatggggctgatggagaccggcatggcctggttctggccgacgcaccgggtagcgcgctggaccgagaccagcggcgttaacgaggtggtggagcttctggaagaaaagcagggcattttactgatcggtatccattttctgaccctcgaaatgggtgcgcgaatgtacggcatgtttaccccaggaattggcgtctaccgtcctaacgataacccgctgattgactggctgcaaacctggggacgcttgcgctctaacaagaccatgctggatcgaaaaaatctgaaagggatggtcagggcgctaaaagagggggaaattctctggtacgcgccggatcatgactacggtccggccagcagcgtcttcgccccgctgtttgccgtcgaacaggcagcgaccaccaccggtacctggatgctggcgaaaatgtccggggcgacgattgtgccgtttgttccgcggcgcaagcccaacggcatggggtatgaattgatctccctgacgccggagcgcacgccgccgctggcgagcgccgaggttacggcggcctggatgaatcagattatcgaacagtgcatcctgatggcgcccgagcaatacatgtggctgcaccggcgctttaagacccgcccggaaggggtaccgccgcgttactgaacgcctcggccaaaaaataagcgcatcggtagcacgctcagtaaatcgccgtctatactgaaagggcctgactgaaggctaattccaaggagattgcaggatgaaaaaagtgatagtcgcgttagccctttccgccgttgcatttggcgcctccgccgcgcagttgattaccaaagaagaagtgaaacacttcaaactgaccaaagtcgggccgatctcggtggggccgtccggtggcgaattctcttcgccttccgatctgcacgatcagctctccaagctggccgatgagaaaggcggaaagtactacgtgatcaccgctgcgcgtgagcatggccctaactttgaagccacagcggaagtgtataaataaccttttttaaagcgtgccgtatcggcgcgcaacgcactgagcctggagcgcgttaagcctccgggcttatttttttctgctatcggaattgccttaggcaatagcggcagcggaaatgcgtttttatcgctatatatagatttcatgatcacgatgttaatgaattattgctttttattgttaataaagagccaattccggcctaatgcctgaggaagtgacccctggcaaaaataggtaggacaaatgtgttatcatcgcgcctttccctttttgtctggggctttcttgtatgctacaacctgttgttcgcgtcggtgaatggctggtaaccccctctgtaaaccaaatcagcaggaaggggcgccagcttacccttgaaccgcgtttaatcgatcttctggtcttttttgcccgccatccgggggaagtgcttagccgggacgagcttatcgaaaacgtctggacccggaacgttgtgaccagccacgtcgtcacgcagagtatttctgaactgcgcaagtcgctcaaagacggcgacgacgttagccttgagtacatcgcgacggtacccaaacgggggtataagctcacggtgccggtgatctggtgcaccgaagagggggaggagctagccccgtcgatggaggcgctgacgccttcgccgtcgaccgccgttcctgcgccgtcgaccgccgttcctgcgccgccggccgccggtgcgccatccgacgtctctgtccctctccctgatgccgccgcgccgccaccggctcctaccgtggccagcgcgccgtcaggccgcaagcgcctcactaccgccctggtgtgggggctgttcctgttggcgctgggcacctgcgtggcgctggtggcgctgtcgagcatggaatcgcggccgccggtcaacaaggcgcgtctgctgctcaatccgcgcgatatcgatatccacctggtgaatggcaactcctgcgctaactggtcgtcgcagcactcctacgccgtaggactggccagcctgatcaccacctcgctgaacaccttctcgacctttatggtgcatgacaaaacggactacaacatcaatgagccgagcagctccgggaaaacgctgaccatcgagttcgtcaatcagcgccactatcgggcgcagcagtgctttatgtcggtccagctggtggacaacgccgacagctcgacgatgctggataagcgctactttgtgaccaacgataaccagctgaccatccagaacgatctgatgaacagcctgtcggatgccctggcgcagccgtggccggcgcgaatgcaggcgatgctcaggcaatatcagccctcgcaaagcgtggcgttaacctatttctaccagtcgcatcagctgttaatgaagggcgacgtcgattcattaagtaaggccagtagcctgctggatgatgtgattaagcgggcgccggattttatttacgcctatgccgaaaaaacgctggtggatgtattgcgccattcgcaacagccgctggacgataaacagctggccgccctctacagtgaagtcgagcgggtaggggcgatgccgggtataaaagacatggcgatttattatcaaataaaagcggtggattcattggggaagggcaaagtcgacgaagcaaataccgcaattaatagtgcgattgatttagagatgtcatggctaaattatgtgctgttaggcaaagtctatgagatgaaaggtgagaaccgtctggctgccgattcttacatcacggcgtttaatttacgtcctggcgaagataccctgtactggattgaaaatggggttttccagacgtcggttaaccgagtcgttccatatctcgacaactttctctcttcagaataagtaaaccctcatcatgtgcaaggttttgggcatggtgaggttaaatttatgtttctcatgaagcctcttgttgttatttttatttagcattcaggaggctttaaataacagtcagataacacgccctgcttcttgtaagttgctgtaatacaacgatgtttatctttttctgacaccctgttgtcatgtttatatgttaagcgaaaaaggtcaaaatatcatttgtctgatgtttgtttttatatcactttatctttaggacttatctcgtacaaatcagtaatcttgttggcagttggtcgggtcaattaatggttctgtatcatgatctgtacctcccaaataaacttaggagaaaaacaaccatgagttctgccaagaagatcgggctatttgcctgtaccggtgtcgtcgccggtaatatgatggggagcgggattgcattattacctgcgaacctggccagcatcggtggtattgccatttggggctgggtgatttcaattattggtgcgatgtctctggcttatgtttatgcccgactggccactaaaaacccgcagcagggcggtcctattgcctacgctggcgaaatatctccggcattcggtttccagaccggtgtcctttattatcatgcaaactggattggtaacctggccatcgggattaccgcagtttcttatctctctacgttcttcccaattttaaataacccggtgccagcaggtattgcctgtattgccatcgtgtggatctttactttcgttaatatgctcggcgggacctgggtcagccgtctgaccactattggtctggtactggtgcttattccggtagtcatgaccgcggtcgtcggctggcactggtttgatgtcgctacctatcaggcgaactggaatacctccagcaccaccgatagccacgcggttattaaaagtatcctgctctgcctgtgggccttcgttggcgtagaatccgccgccgtgagtaccgggatggtgaaaaacccgaaacgtaccgtgccgctggctaccatgctgggcactgcgatggccggtatcgtctatatcgccgcgactcaggttatcgccggtatgtatcctgcttctcagatggccgcgtccggtgcgccgttcgcaattagcgcctctaccatcctcggcggctgggctgcaccgatggtatccgctttcaccgcctttgcctgcctgacttctctgggctcgtggatgatgctggttggccaggccggtgtacgtgccgccaacgacggtaacttcccgaaagtgtatggcgaagttgataacaacggtattccgaaaaaaggcctgctgctggccgcagtgaaaatgaccgcgctgatggtgctgattaccctgatgaactccgccggtggtaaagcctctgacctgttcggcgaactgaccggtatcgcggtactgctgaccatgctgccttacttctactcctgtgttgacctgattcgtttcgaaggcatcaacatccgtaacttcgttagcctgatttgttcggtactgggttgcgtgttctgcttcatcgcgctgatgggcgcaagctccttcgaactggccggcactttcatcgttagcctgattatcctgatgttctacggtcgcaaaatgcaccagcgccagaacaacgcatcggataacaacaccaccgctaacgtgcactaatcagcaacccgttttcctgaggctccttccatcacctgtcatcacgcgacgggaggggctttctacatctggagatttgactatgaacgttattgcaatcatgaatcacatgggggtttacttcaaagaagaacccatccgtgaactgcatcgtgctctcgaacgcctggacttccgtattgtctacccgaacgaccgtgacgacttattaaaacttattgaaaacaactctcgtctgtgcggcgtgatcttcgactgggataaatacaatctcgaactgtgcgaagaaatcagcaaaatgaacgagtacatgccgctgtatgcgttcgctaacacctactccactctggacgttagcctgaacgatctgcgcatgcaggttcgcttcttcgaatatgcgctgggcgctgcggaagatatcgcgaacaaaatcaaacagaacactgacgaatacatcgacaccattctgccgccgctgaccaaagcgctgttcaaatatgtccgtgaaggtaaatataccttctgtaccccaggccacatgggcggtaccgcgttccagaaaagcccggtaggcagcatcttctacgatttctttggctccaacaccatgaaatccgatatctccatttcggtttctgaactgggttccctgctggaccacagcggcccgcacaaagaagcggaagagtatatcgctcgcgtgtttaacgcagaacgcagctacatggtgaccaacggtacttctaccgctaacaaaatcgtcggcatgtactccgcgccggccggcagcaccgtgctgattgaccgtaactgccacaaatcgctgactcacctgatgatgatgagcgacattacgccgatctacttccgtccgacccgtaacgcctacggtatcctcggcggtattccgcagagcgaattccagcacgcgactatcgccaagcgtgtgaaagagacgccgaatgcgacctggccggtacacgcggttatcaccaactcaacctatgatggtctgctatacaacaccgacttcatcaagaaaaccctggatgtgaaatccatccactttgactccgcgtgggtgccttacaccaacttctcgccgatctatgaaggcaaatgcgggatgagcggcggccgcgtcgaagggaaagtgatttatgaaacccagtccacgcacaaactgctggcggcgttctcccaggcgtcgatgatccatgtgaaaggcgacgtaaacgaagagaccttcaacgaagcctacatgatgcacaccaccacctctccacactacgggatcgtggcctccaccgaaaccgcggcggcgatgatgaaggggaacgctggtaagcgtctgatcgacggctctattgaacgttccatcaagttccgtaaagagatcaaacgtctgaaaggcgagtctgacggctggttcttcgacgtctggcagccggagcatatcgatggtcctgaatgctggccgctgcgttccgacagcgcatggcacggtttcaaaaacatcgataatgaacacatgtacctcgacccgatcaaagtcacgctgctgactccggggatgaagaaagacggcaccatggatgacttcggtattccggcaagcatcgtagcgaaatacctcgacgaacacggcatcgtggtagagaaaaccggtccgtacaacctgctgttcctgttcagtatcggtatcgataagactaaagcgctgagcctgctgcgtgcgctgaccgacttcaaacgcgcgttcgacctgaacctgcgggtgaaaaacatgctgccgtcgctgtaccgtgaagatcctgaattctatgaaaacatgcgtattcaggacctcgcgcagaacattcacaaactgattgagcatcacaacctgccggatctgatgttccgcgcgtttgaagtgctgccatcgatggtgatgaccccgtatgccgcgttccagaaagagctgcacggtcagacggaagaagtgtatctcgaagagatggtcggccgcgtcaacgccaacatgatcctgccgtatcctccgggagtgccgctggtgatgccgggtgagatgatcaccgaagagagccgtccggtgctggagttcctgcagatgctgtgcgaaatcggcgcccactatccaggcttcgaaaccgatatccacggcgcctatcgtcaggcggatggtcgttacaccgttaaagtgctgaaagaagagaataacaagtaatagacgcacaccagggaagtggcttgccacttccctttttcacgctgcaaggagaacacatgaaaacaccctcacagccgcgcgcgatttactacatcgttgcgatccagatctgggagtacttcagcttttacggcatgcgcgccttactcatcctttaccttacccaccagcttggcttcgacgacagccacgccatcagcctgttcagcgcttacgcatctctggtttacgttacccctattctcggcggctggcttgccgaccgcctgctcggcaaccgcacggcggtaattgccggggcgctgttgatgaccctcggccatgtggtgctgggcgttgagtcgacctccgcatggagtttgtacgtcgcgctggcgatcatcatctgcggctacggcctgtttaaatccaatatcagctgcctgctcggcgaactgtacgctcacgacgacccgcgtcgcgacggcggtttctcgctgctgtacgccgccggcaacgtcggctcgattgccgcgcccatcgcctgcggactggcggcgcagtggtacggctggcatatcggcttcgcccttgcggggatcggtatgtttatcggcctgatgattttcttaagcggcagccgccacttccggcatacccgcggcgtcgataaaccggcgctgcgggcggtgaagttcgtgctgccgacctggggctggctgctggtgatgctctgcctggcgccggtatttttcacgctgctgctgcaaaacaactggtccggctatctgctggcgatcgtctgcctgttcgctgcccagatggtggcgcggatcatgatcaaagccccggagcatcgacgcgcgctgtggcagatcgtcctgctgatgctcgccggaacgctgttctgggtgctggcgcagcagggcgggagctcgattagcctgtttatcgaccacttcgtcaatcgtcgtctgctgaactgggacgtgccgaccgcgctgttccagtcagttaacgcgatagcggtgatggcggccggcgtggtgctggcgtggctgatgcgcccggaaggcagcgtgcgttctgtgctgcgcgtctggctgaaattttctttcggcctgctgctgatgggcggcggctttatgctgctggcgctcaatgcccgccatggcgcggctgacggtcaggcctcgatgggcatgatggtcgccgggctggcgatgatgggctttgccgaactgtttatcgacccggtggcgatggcgcaaatcacccgtctgaacatgcccggcgtcaccggcgtattgaccgggatctatatgctggccaccggcgcggtggccaactggctggcgggcgtggtcgcccagcaaaccaccgaatcgcaaatcagcgatacggcgattgccgcctatcagcatttcttcgcgcagatgggcgaatggaccctcggctgcgtggcggtgatggtcattatcgcctttgccgcggcctgtagcgttggcaaacgtcgtgcggctgccggtgaaattaccggcggcggcgcctgacgctcgtcccggctcgtggcgtaaacaccttgtccgggctgcgattcgtagccccggtaagcgcagcgcgaccgggggcattacctcaacagcggagcgcgaagtcgctccttgcacagcttagtgaacaggaggaggatattctggcatgcgcggaggccaacgataaaaaataccgttactgaagccatagctgagtgagatcagcttggagtgaatccaggatcgttaagattgtgctctggtgtcttcccagagacaggccgcgcggaagggtgacctggttcaatttatcgaagctagtttgaaagcaaggttatgaggaatccatatgtctgaacaacaagcacaaggtgccgatgaggccattgaccttaataatgaactgaaagctcgtcgcgaaaaactggctgcgctgcgtgagcagggcgtagctttccccaacgatttccgtcgcgatcatacctctgaccaattgcatgctgaattcgatgcgaaggacaacgatgaactcgcttccctgaacgttgaagttgcggtggctggtcggatgatgacccgtcgtgtgatgggcaaagcctccttcgtcaccctccaggacgtcggcggccgcattcagctgtacgtggcgcgcgatgacctgccggaaggcgtctacaacgaacagtttaagaaatgggacctcggcgatatcatcgccgcccgcggcaagctgttcaaaacgcaaaccggcgaactctcgatccactgcaccgagctgcgcctgctgaccaaagccctgcgcccgctgccggataaattccacggcctgcaggatcaggaagttcgctatcgccagcgctatctggatctgatcgccaacgaagagtcgcgtcatacgttccgtatccgttcgcagatcctcgccaccatgcgccagttcatggtggcccgcggctttatggaagtcgaaacgccgatgatgcaggtgatccctggcggtgcgtcagcccgtccgttcattacccatcacaacgccctggatctcgatatgtacctgcgcatcgcgccggaactgtatctgaaacgtctggtggttggcggttttgaacgcgtgtttgaaatcaaccgtaacttccgcaacgaagggatctcggtacgccataacccagagttcaccatgatggaactgtatatggcgtatgcggactacaaagacctgatcgaactgaccgagtcgctgttccgcaccctggcgcagacggtgctgggcaaaaccgaagtgccgtatggcgaccaggtgtttgatttcggcaagccgtttgaaaaactgaccatgcgggaagcgatcaagaaacaccgtccggaaaccaacatggcggatctggataacttcgacgcggcgaaagcgctggcggaatctatcggtattcaggtagagaaaagctgggggctgggacgcatagttaccgaaatctttgacgaagtggcggaagcgcatctgattcagccgaccttcatcaccgaatacccggcggaagtttctccgctggcgcgccgtaacgacgtcaacccggaaatcactgaccgctttgaattcttcatcggcggccgcgaaatcggtaacggtttcagcgagctgaacgatgccgaagaccaggcgcagcgcttccaggatcaggtgaacgccaaagcggcgggcgatgacgaagcgatgttctacgacgaagactacgtgaccgccctcgagtacggcctgccgccgaccgccggtctgggtatcggtatcgaccgcatggtgatgctgtttaccaacagccataccatccgcgacgtgatcctcttcccggccatgcgtccgcagaagtaatccgttgcactccctcccggcctgcgccgggaggttctccctgcattatccccggcctgtcggcagagcgatgttattacaggactttttgcaacgtgccgcgctggctgccgtttgcccatacgccgttaaaggcgtcgttcagcgtaaaggctgagcttttcacccggaaggtcagtttaccctggctggctttcgccgcctcaaccagatggccgcgggttttcaccgttttagcggtgacggtaatctcatcaattttatcgccatactccgtataaacataccaggtgcccacccaggggccgaagccgctatcggcgtgctgtgcggcggcggcattctcggctttggttttatgaatatcgcaggtgatcccgtcggtcatctgcgtgcagccggaacgttcaagctgttcccggtatttcgcgctaatggcgtgggccggcgcggcggcgaccagcgccagggtcagggtggtgaaaagccaggtcttattcatcttattgtttctcatcgcgatagcggcgtgccgggccagagagagggatacacgttggtgtattctcccgttggcgtcagaataaaataacccaaccagtcctgataagtaattagcaagaggctctggggttatttattagtaaaacatcaaagtttcatgcttatttcgcaagccaaccttcccactgcttgtcatattattgcagagagaatgttaattatttgatgttttaaaagcggctatgtgtcattcaggcaaataacagcaggcctgtccttggcgtgcggcaaaagcccgcgctggtgcggtgttgagttgttttcatattgctatcatcatatttcgaatgaaagggataacctctggagcgggttattaagccagtaatttttatccgcaaaataagccggcggcaagcattatttccatttatttttcagggttacctgaaatagcgaatataccgccagcgcaatgatggatttccatcatttctccgttttcatcgtcggtcgtcacctgcttatagtgacgccagacaagaccacagggtggaaaggagaacaagatggcgacagagcaactgcggtggggcgtgagccccctgtgctggaccaacgatgtactcgaggatttaggcggtgatattcccctggatacctgcctgcgcgaggcgcgggaggcgggctatcagggcattgagttaggacggaaatttccccgccaggcagcaaccctgggcccgctgctggcggcggccgacctgcgcctggcgtccggctggtacagcggcatgctggccgaccgcagcgtggaagcggagctggaggcggtgcgggagcacgcccagctcctccggcagctcggcgcgaaggtgatggtttacggcgaatgcgggcaactgccaggtgaaaccccgcttgatgagcctatttcgctctcgccgccgttaagccgcgtcagcctggcggcgtattgccacaagctgaatacctttgccgacctgctgctgcgcgactatgacctccagctggcctatcaccatcatctgatgatgctggtggagcacgatgacgagctggagcggtttctgtctcacacccatgacaacgtcgggctggcgtttgataccgggcacgcctttgtcgccggggtcgagatcccgcgcgtattgcacaaatatggccaccgtatccgccatctgcatctgaaagacgtgcgtccgcaggtgctggggcgtctatatcgggaaaacctgagctttaacgaggcggtgcgcgccgggctgtttaccatcccaggcgacggctgcatcgactatgcgccgatcctcgactttgtccgggacagcgactaccgcggctggctgattatcgaagccgagcaggacccggcgatggcgccgccgctggccaccgccagccgcgcctatgcctggctggcgcaccatttatcttccccttcatcgtcagaggagtacgcatcatgagcgcgcggttaaatatcggccttatcggctcaggttttatggggcaggcacacgctgacgcttaccgtcgcgcggcgatgttctatcccgatctgcccaagcgcccgcatctctacgcgctggcggatcaggatcaggcgatggccgaacgccacgcggcgaaactgggggcggaaaaggcctacggcgactggcgcgagctggtaaacgatccgcaggttgatgtggtggatatcacctcgccgaaccatctgcactacacaatggcaatggcggcgatcgcggcgggtaaacatgtctattgcgagaagccgctggcggtcaatgagcagcaggcgcaggagatggcgcaggcggcacggcgcgcgggggtgaagaccatggtggcttttaacaacatcaaaacgccggcggcgctgctggcaaagcagattatcgcccggggcgatattggcgaaccggtgcgctttcgcggcacctttgatcaggggttttataacgacccgaacctgccctggtcctggcgctgctcgaaaactctcggcggcagcggggcgcttggcgacctcggcgcccataccctgtccgtcgcccagtttttgctgggcgggatccgcgaagtgaccgccagcgcgcaaacctgcctgcgccagcgtccggtgccgcaaaccgatgccgggtatgccagccgggtcgcggccgatgccgagtggcgggaagtggaaaatgacgatcaggttcagtgcctggtcaatttcgacagcggcgccgcgggggtgattgaggcctcgcgcatcgccgccgggcggatcttcggcgtgttctgggaggtctccggcaccgaaggcacgctgtatatggacggggagcgctttaacgagctgcaggtgtatcgcttcaacgatgacaaacatgaccgcggctttaagacgctgtatgccgggagccagatcccggcctatgccggcttcttcggcttcgattttggcggcggcgggctgggctattttgacgtcaaggtgatcgaagtgcatgacctggtgcaggggatttgcggggagggcgactgctatcccaactttgaatttggtttgcagaatcagcgcgtgctgtcggcgattgaagcctcgatggccagccgtcgctgggtgaacgtggttaaagactaaggagccgctatgtttccgtcacacttaccaaccccgcgccgcccggcggcgcagagcattcccatcctgcgctggggcattatcggtcctggctggatcgccgagcgctttgtgcactcattgaaaacctacagccggcagcaggtggtggcggtggcttcccgcagccaggcgaaggccgaccgggtggccgcggaatgggggatcccccaggcttacggccaggtggaggagatgctggcgcgtccggatattgatgcggtgtatattgcgacgccgcacaaccatcactttcccgacggcatgcaggcgctgaaggcgggtaaacacgtgctgattgagaagcccttcgccctcaacctcggcgaagggcgtgagctgcaggccgaagccgcccgccaggagaagctggcgctggaggcaatgtggtgcgattacgcgccgaaatatgatgtgatccgccagctgctggaggatggggcgctcggcgacctgcataccctgctggccgatcacggcgagtatttcacccccgagcaccgcatcttcaatgccgatcttgccggcgggccgatgatggacctcggcagctatgtgacctcgtttgcgctgatggtgggcggcatgccgcaggagattgtcgcccgcggcagcgccacggcggaggggctgaacggtcagacgtcgatgctgtttagctggcagaacgggatgcaggggttgttaaacaccactttgttcagcaacacgccgggcggggcggtggtggccggacgccaggcgaccctgacgatcgacggccagttttacgcccccggcggcttcacgctcgccgccagccagggcgggcaggtgctgcgctgggaagagccgcgcaatcgctacgaccagctgttctggcaggcggagcattttgcctggtgcatcggacaggggttgcaggactcgccgctgcggccgctcagtcgggtgctgcagaatctgcaggtgatggatgaggtgcggcgccaggtgggcgcggtgtttaacgaagaacgctaaggagccggccgggcattggtttgcagatagcgcgagcgtatctgccattgcccggcaaaaggacgcgtacgatgcctgatgtctgttgcccggcggcgctgcgcttgcgcgggcctgggatatctatgcaaccgtttgatattaaagcatattaatgcctgtgttatgtaggccgggcaaggcgttgccgccgcccggcataaaggcaggtactgcgctagatagcggttgcctcgcacccgctcagcgacagtcatcgacggcgacaaactggccatgctgtagggactgaaccgccgcttcggcaatggcctgcgcctgcaggccgtccagcaggccgggcaggtcggcgacggtttcaccattcagggagcgaataaaggcgtcaagatgctggtaataagatccctgtacccggctgaaccagtccggccacaggcccggctcaatgcgctgattgccgcgccacagggtagggcccgccggcgactggctaccggactccagcgcgccttcggcgcccagcaggttgatccgttcatcgtacccgtggccggtgcggcgggtattgtccaactgcgccagcgcgccgccgcgcatctgcatcatcaggatggaggtgtcgacatcgccaaattcggcaatgtccggcagggccagcgccgcgcccatcgctgctacggtgcgcacttcatcgccagtgagaaagcgcaggagatcgaagaagtggatcgcctgatcgcgcatctggccgccggagctgcgcagatagtcgagcggcggcatgctggaggcgcggcagaccatctgcaccagctcgacccggccgatcagtccttgctccagctggcggcggagctgctgatggctgctatcgaagcgccggttaaagccgacagtgaccggcacgttcagggggagcacccgctccaccacctcacgggcgcgcgccagggagaggtcgatcggtttttcgcaatagactgccttgcccgcccgggcggcggcttccagcagttcggcatgcgacggggttgaactggcgatcagcaccgcgtcgatggcgtcgctatggatcgcctcgctcacggtcaccgcccgggcgccatagcgggcggccagcgcctgggcgcgctccggggcggcatcggccaccatcgtcagcgcacttccttcatgacgagcaagactggcggcatgaacctgaccgataaaaccactgcctaccagggcaaaacgtttgcagatcatttttttctccagaatggcgaggggacgctgccaccataatcggtttgctaaactcactgacactgccgttttgatggatttccatcatgaagagaggggcgatgaaaaatatttcactggcgatgctggccagacagattggcgtcggcgtggccaccgttgaccgggtgctgaacgagcgcggcggcgtatcgccgcagaccacgcgcaaagtgctgcaggcggcgcgcgaggcggggctgaagcggatcctgccggaggagcaccgctttccctggcaggttgaggtctttctcagcagcaatgactcgtttttctttccgcagctggcgcaggattttgccgccgtggcggatagcctcggctatcgccgtctgaccttgcaccgcacctttgtcccggagtcgcagccgacgacgctggcccggcgcattgcgcgtagttgccagcagcgtcaggggatcatcgtcttcggcaatgaccatcccgcggtgcacgacgcgctgcgccgctgccgggaggctggcgtcccggcgatcaccctggcgacggacctgcccggcgccgaccgactctgccacgtggggatcaatcagctgcaggctggccgcacggcggggttaatgctggggagaatgacgccgcggcccggcgaggtgctgatggtcagcggccggcaagattacagcgcgcatcgcctgcgcattcaggggttccgcgaggtgctgagccagcgctttccccacctgcagctcagcgacgtgctggcgggcgaggagcggcgggagcagatcacccgcctggtggagcaagccctgtgccgcagccggaatattgttgggatctataacaccgggcttggcaatacccagattgccgaggcgctggcccgccaccgccgcgaaggcgacgtctgctggatcacccatgagcgttacaacaccacccggcagcagctggcgaagggcagcctggcgttaacgctcgatcagaacacccgccagcacgcccagctggcgatcgacctgatgctgcgccatctggagtccggctaccagccgcaaacctatgccgacggtaaagtcgactttatcctctacagcgccgagaacgtggactaaggcgtacggcgcctcccttcctgacaacacggatttccccggcgggtaaatgccaaccccgccgggagggatcgcttcaaagcgttgtctgcttctcatttttcgctcatttatgcggcaatgttagatgtctgtcaaaattctgttactgcatagttttaaaannnnnnnnnnnnnnnnnnnnnnnnnnnnnnnnnnnnnnnnnnnnnnnnnnaataaatggtctgaaatccaggttgcggcgtaaatggactgatgtttcaaaatagtgatgataaaacagccgttatttgtgatttagatcacgatggagtgcgagaggtgccgcagcgtcgtcgatataccagcagacatttgccgcaacgtaactgaaattaatttttcattttgtttcattcaccggcgtacctacaaaatcaaggatcaactatgaatattaagaaaacgattgttgcctctttgttagcctgcatgctgcctgcggtggttatggcaaaagatgtctccattggcgtctcgatggcgctgtttgacgataacttcctgacgatcctgcgtacctcgatgcaaaaagagatgaaaaaagatggcgttaaatcgcagatcgaggacgcgaaaggggatgtctcccagcagctgcagcaggtgcagaactttatcggccagggggtggacgccattatcgtcaacccggtggataccaacgcggtgaaaccgatcatggatcaggccaccaaagccgggatcccgctggtgtttgtgaaccgccgtccgcaagcggagctgaccgacaagatggcctatgtgggatctgactccattctcgccggccgtctgcagatggaagcgctggcgaaagcgatgaacggtaagggcaatgtggcgatcctgctcggcgacctggcgaatgaatccactcgcgaccgcaccaaaggggtggaagaggtggtagcgaaatacccgaacatcaaaatcgtccagaagcagaccgcgaaatttacccgcaatgacgccgtggacgtggtcagcaactggatgaccagcggtgaggatatccaggccatcgcctccaacaacgatgaaatggcgatcggcgccctgcaggcgctgggcaaaaacccgaaccatattctcatcgctggcgtggatggcaccccggatgccctgcagatgctgaagagcggcaagatgatcgccaccatcttccaggatgcgaaaggccagggtgaaggcgcagtcgacgcggccatcaagctggcgaacggcgagaaagtggaaaaaatcatcgacgtgccgtatcagctgatcaccaaagagaacatggctgaatttaccaaccgtaatcagaaatagtcctggccaacctgtggtacggaggtggatgtatgaacgcttttgcccttgaagccgaaggtatcagtaagttcttccccggcgtgaaggcgctcgataatgtctcattgcgcgtgcgtccgggaacggtgcatgccctgatgggcgagaacggcgccggtaaatccacgctgatgaaatgcctgatcggtatctatcgccccgataaagggtcgattcgcgtgaaaggggagccggtggagtttaccgacaccatggatgcgctgcgctcggggatctcgatgatccaccaggagctcaatctggtgccgcatatgacggtggcggagaatatctggctggggcgcgagccgatgaagtacggctttgtcgaccacggtcagctgacccgccagacccaggcgctgctggataagctcaatatccgcttaaccgctgaccggctggtgggcgacctgagcatcgccgcccagcagatggtggagattgccaaagcggtctcatggaacgcggatatcgtgatcatggatgagcccacctcggcgctgaccgaaggcgaggtggctcacctgttcaccatcatccgcgacctgcgcgcccaggggaaagcgatcatctatatcagccacaaaatggatgagatctttgccatcaccgatgagatcagcgtctttcgcgacggcacctgggtagggagcaaaaacaccaccgaatttacccggcagtcgctgatcacccagatggtgggccgcgaattaacccagctgtttccgaaatttaataacaccatcggcgaagaggtgctgacggtgcgcaacctgacgcgtcagggcgtgttccatgacgtcagctttagcgtacgccgtggcgaaatcctgggcgtggccgggctggtgggcgccgggcgcagcgaggtgatggaaagcctgttcggtatggagcgcttcgacagcggcgaagtgctgatcgacggggcgccggtgaccatcgattccccctccgtggcgattgaaaaggggatggcattattaaccgaagaccggaaaaagtcgggcctgtttctggtgctgtcggtgctggaaaatatgagtatcgtcaaaatgccggaatatatcggcaagagcggttttgtccagcacgtgaaaatggccgaagactgcatggagcaaatacgccggctcaatattaaaacgccgacgatggatcaaattattaataacctcagcggggggaatcagcaaaaagtcctgattgcgcgctggctgttagcgcaaccgaaaatcttaattctcgatgagccgacccgcggtatcgacgtcggggcgaaggcggagatttatcatcttatcagtgaactggcgaatcggggggtggcggtgattatggtctcctctgaactgccggaaatccttggcatgagcgatcgggtcatggtgatgcatgaaggtcgtatcaccggcatcctggaaaaagacgaagccgaccaggaaaccattttgtcgttggcatcccattgaggcaaagagaatgagtaatatgaaattaacggcggctccggccagcgagggttcctccttcttcgctaatttgcggcataaaatgccgaaagataccggcatctttgtggtgatgctggtgattgccctgacctttgaaatcgccggctggtatgttcgcgaccagtcgttcctgctcaataccaaccggctggtgctgattgtgctgcaggtggcgattatcggcatcatcgccgtcggcgtcacccaggtgatcatcaccaccgggattgacctctcctccggctcggttattgcccttgcggcggtggtggcggccagcctggcgcaaacctccgatagcctgtcgccaatgttcccggcgctggtcaacctgccggcggtgatccccatttgcgcggggatcggcgtcggcctgctgtgcggcctgaccaacggtttcctggtgacgcggaccggtatcccgccgtttatcgccaccctcgggatgatggtttcggcgcgcggtctggcgcagtattacactcagggcaacccgatcagcttcctctccgacagctttacggcgataggccagggggcgatgccggtgattatcttcttcgtgatcgccgccgtgtttcacattgcgctgaagcatacccggtatggcaaatatgtgtatgccatcggcggcaacatgacctcggccaaagtgtccggcatcaacgtgaataaatatctggtgatcgtctacaccatcgccggggcgctctccggactggcgggggtggtgctggcggcgcgcgtcagcagcggccagtcgagtatggggatgtcctacgagctggacgcgattgccgccgcggtgatcggcggcagcagcttaatgggcggagtggggcgcattaccggcaccctgattggcgcgatgatccttggcctgatcaaaagcggttttacctttgtcggcgtcgatgcctatgtgcaggatattattaaaggcatcattatcgttgcggcggtaaccatcgatatgcgtcgcaaccggaaaaaacactaatcttatcaacgggcggcaacggcgaaggatgtcgttgccgcccgtcctgtccagaaataaacaaaatactccccgccaggctccgcctgtctgttttgcccgcgctgcgcatcctgtacagtttcgccacttccgttgtccattcgtcaggggccacgcgtggcctgcggtttctggagtcgtatgaatacaccatcctttggcaaattctcgccgcgctggctagcgggaaaaaggggccttatcgtcacgctgctcgcggggctggcgatcctggcgctcggtcggggcatgaatttgccggccagagaggtttaccgtgagaggcagatccgccagctggaggaggatgcgcagtgggtggcggaacgccttgagcggcggatgaacattccggcgccgcagcgggaagcgacctggccgctggcggcgatgcgcgccgctctccagaccctcgcccgggagcggcattatcagctgctgctggtgaatggcgacgggcatctgctggcggcatcgcacgcgctgccggccagcgtgctggcccaggtgcaggcgcagttcccgcgagagatgcagcccccgctgttcggcagccactaccagaccattcagccattcgccccgcatcagcggatgttaagccgggcgctgaacggcaacgcggggctggcgggctggaatctggtgatgctggcgccggatggtggattgccctcgttgctggtggcttaccgctggccggtaacgatcggccttggcgcggtgctcgccagcgcgctgctggcgctgaggcaggcggcgcgcgccaggcgaaaacgctaattgccaaccgcgccgtcagggatggcgaatctgcagggtggcgggcaggtagcgctgaagcggctccggggcctgaccgtcgatcagctggctgagcagatcgtagcagtgccaggccagctggcgattatcctgctgcacggtatcaatgcgcagggaaagcgaatcatacagatagtgatcgtcgaagctggcgagatgaatattggaatccagcagatgatgctggctcatatagcgcagcaccccttcgagcagcccgcaggccgcggtgaagagcgccttcggcggacgccccagccgagcgcagagcgccgcgaacatctcatagccggagctggggtggtagttgccgttgatcacccactcagggcgcagcgtgatccccgcctgggccaggccctgggtgaaccccgccagccggtcgcgcgacggcgacagccgcggctggccgccgagaaaccagaactcgtccgcatgctgaggcgcgatacgggagatcagctcggccgttggggtgaccgagtcggtcatcaccagcggcagggcgctgtcgctgggggagcggtcaaacagcaccaccggcagctgttcgctgagcttctgatagtcggcatcgctgtgcatacaagaggcgacaatcaggccatcgacctggcgggcgatcatgttattgaccaccacgctctcctgacctgggttttcgtcggtgcaggagataagcagctgcacgccggcttcccggcagagcgtctcaagctcgtgggagaaaacggcaaacccgtagttggtgatctccggcaccaccagaccaatggtatggctgcggttatcgcgcagcgagcgcgcgtgaatgctcggctgatagtgctgttcacgagcgatcgccagtacgcgctcgcgcgtctcctgcgccacgcgcagctctttaccacgaccgttgagtaccaggctggcggtcgctttggagacgcccgccagttcggcgatatctttgatagttacgcgtttggttttcatcagcacccgggagcctgaaagcaaaacgcttattctaccatgcatggctgcagcagccagcggcagaatgccaccggcgtcgcaccgctgaagatgagctgccccggatagcccgggaagaagcggctgctcatcaccccttcgccatcgttgatgaaaatctccacgctggagcggtcgataaagatccgcaggcgtcgcgcctcgccgcgccagtagcggtgatgcatctccgccgtctgcaggccgcggcgcgacagacgcagaccgtcgcgattgacggtgagctgcagggcgccggcaaagtccagccccagcgtgctgtcgggggaaaggtcaaaggccagctccatcggggcgaggggcagggtctgtccgcgccagccctgggcttccccgcgcagggcgaccagctcgcgcagcggacgctgatacagagtgccagcctgccactccagctcacgcacgcaggtcatctgatggatccagccctgcgcgcgggtgggctgatgcatctcgtccccgtcggggacgcccatccagccgaccagcaggcggcggccatcatcggcctgcatggtctgcggcgcgtagaactcaaatccgctgtccagctcgtgcagcgggccgtggtcgaagatcccgcgttcggcgtcgaagcggcctgccatccacaccgccggataggtattgagaaagcgctgcgcttcgcgggccagcccctgcgggcagcagatcagcaggtgggtgtccgccagcggaaagagatccgggcactcccacatgtagccggcgttcgccaggccgttcacatcgtgcccggcgatctcccctaccaggcgccactctcgcaggtcgctggcggtaaacagcagcactttgccgcgctgttgcacatcctgcgccccaagaaccatgtaccagcgcccgtcctgccgccacactttagggtcgcgcacatggccggtatagccttctggcagcggcagcaccggccccagcttgcggaaggtgccatcagcattctcggtcgccagacattgccaggcggtgcgcccgccgtcggggaatttcacgttgccggtgtagcacagagtcagggcgccctcgaactcgaccgcgctgccagagtagcagccgttgcggtcatactcttcatccggcatcagggcgataggttcgtgccgccagtgcagcagatcggcagagctccagtgtccccagcacttataggtatggtcgcaggcgagcgggttccactgataaaacaggtggtaacgcccggcgacctggcaaaagccgttaggatcgttcagcagtccgttgaccggcgccagatgccattgcggataatggctgtcggccagcgcctgcggctggccctgcataacggcctgcaggatcgcaggcagacgtgacggtaatgacattattcagcgtccgttttgtatttcagcgtcagagagagcgcgaaggccacggcgaaggcgatcgccattccgataatgtagttcagcagcgagctggcctgcacgatagccatccccgggatcgccgtcaggcctaccgcggtcatgtagacgtgcatcgacaccacccaggcgccgccggcggcaccgcccaccagcgcggcgataaacggtttcacaaagcgcaggttaatcccgaagattgccgcctcggtgatccccagcatcgccgaaaacgccgacggcagggtgatggcttttattttggcatctttggttttaaaccacaccgcaaagcaggcgccgccctgggcgacgttggccatcgcccagatcggcagcaggaagttgacgccaatcgatgggttgcccagcagtccggcctcgatggcatggaagctgtgatggataccggtaatgacgatcaccgaatagaggccgccgaacagcaggcccgccagccagccggcgtggctgataagcgtgctgaggataaacgaaatgccgtcgccgagcgcgcgaccggccgggccgatcagcagcagggcgataaagccggagataatcaccgtcaggaacggagtgaggatcaggtccagcgcgtcagggatcacgcggcgcagccgcttctcgaccatgctcataaaccacaccgccagcagcaccgggaagacggtgccctggtaaccgatcatcgccacttcgatgccgaagaaattcatggtgtggaagccggcggcgacgccccaggcgttggtcagcgccggatgggtgaggatcccgccgagggtcgcgcccagataggggttaccgccaaattcgcgtgcggcggtaaagccgatcaggatcggcagaatgataaacgccgccgaactgcacatatccagcatgatatagagagcgttgctcgggtcgacccaaccgtaggttttcaccatccccagcaggcccatcagcaggccggaggcgacgatggccggaataatcggcacgaagatgttggacagcaggcgggcgatgcgctggaacgggttcagctttttcgccgccaggtcggcggcttcggatttgctcgattcgctgatgcctgcggcctggataaaggcggcatagactttattgaccaccccggtgccgaagatgatctgcatctgtccggcattgcgaaagcagcctttcaccccgtcgattttgccaatcgcctgctgatcggcgagcgcgtcgtcgaccagcaccagccgcaggcgggtggcgcagtgcgcggcgctggcgatattttccttgccgcccagcaggggaagcagtgagcgggaaatctgttcaaaatccatagtaccctctaaatgcatgatgatatggcgtgggcggcgccagccgtggcaggcgccgcgaaccttatatttatgtgttatttaccctgtcgccccggttgccgtcagaaccaggtctccatttgcataccgaacgaccattcgccgcccgatttgaatccgttgctgcctaacgcgtcatcgttggcgtagttgtccagttttttgctccagtccatccacgatgtatagaagcggatctccggccgcgagaagaagtcgccgatgctgcccaccttgaaggtcggggcgaaggtcagcttgtagaagctgccattgaccgcatggcgatcgttgtagccttcaggctgcagatccatgtactgatagctgccctcccaggcgagggcgaagttctgcgtcacttcctgaatcagacgcaggttgagggtggcccactgatagctgtcgccatcgacataacgatctttactgctctgcgccagcacggccggggcaataaaccagcgatcgctcagcggcgtggtgccatagctggcgaagcgccaggtattggcccccgggcgcagcgcgccgtcggagccgatgcctttaacctcggcgcccagcccgtggccatacagcagggccgttttgctggtcccgtcgcgcaggccatagaagctctcattgtgcaggcccagcagggcatgaaccccggtgttagcggcatcgcctttcaccagattgccgttcgcgtcctggcggtcgtcattatctttcgcccgcatcccgctgaccatcatctgcaccgggccggcaaagttattcatgctgacgatatagttctgcacgctgttgctgctgtcggcgatatcgccaaagttgcggccgtataacgagaagttgctgcgcaggctgtcgttccatttcacgtcgtagatcccgccgccggtcccggcgaggaacaccacatccgagtcaatccagtggatgtcgaagttgtcgcggtcaaagcgtttcccggcccacagggtcgagcctttgaacgggccttcgaaggtcggcagattgcccagctcgacgaacgcctggcgcacgttcagatcgctgctgcttgccgtccagtcgttataggtggtctgtccgtcggccaccatcactttgaaacgggtggtcgccccgttgtccagggtctgtttatgttcgaggttcatttccacataggtgtcggcctggttgcccaggcgaccaatggcgccgccggtctccccggcgggggtcatataagcgccggatttggtactggcggccgagtcgttcatgatcaccccggaacgcgcatagccgtggaactcaaaaccgccgggccgttcggctttttcttccagttgagtggtgcgcctggccacctgctgggtggtggcctgggtttgctgctgctgctgggttaactgctgaactttctgctccgctgaggcggcgcggctttcggcagtgctggcgcgggtctcggcgtcctgcaggcgtttttccagggcggcgagacgcgcttcaatgctgttcaggtctgtctgcccatgggcggcggcggtgccggttagcaaagcaataagaatggctaacttccgttttttatacatgttggtgacatccaaaggtaaatcagtgagtgtgctaatttttgctaaaccggtttagttgatatggtaaacatgtcggtaacgcggtgaaaataaaaattgctaaaccggtttaagaattgtgatgtcgccagcaaagtgggccgttaaccggcccaaggggatcacagcgagcgctgaagatcgtccctgtagggcagggcggtcatggcgcctttggcggtggtggccagcgcgccgcaggtttgcgccagcgcgaggtcgggagccagggctgcgaggttgtccgggataccgtgggcggcgaggccggcgagtagcccggcgacaaaggcatcgccggcgccggtggtatcgacggccaccaccgggcgggcagggaagtggctaacctgcccgcgcagggcggcctggacccccgctttaccctgggtcaccagcagtagcgtcggctggaagcgggcgttcagccgggcgatgccgctgacgatgtcgtcgctgccgctgataaacgccagctcctcttccgaaagttttatggcgtcggcgagggccagcgcccggtcgagacagtcgcgaaggtcctgcggatcctgccacaggtcgctgcggatattggggtcgaagctgacatagcccccggcgcgctttatcgcctccatcgccgcgaatgtcgtgctgcggctcggctccgcgctgagagcgatggagcagacgtgcagccactgaccggcggcaaacggcgggagatcctcgggctgaaggaacaggtcggcgctcgggcggaccataaaggtaaaggtgcgctccccgtggctatcgagatcgaccaccaccgtggaggtgcgctgcgccgcatcgaggcgcatatagttcacatccacctgctcctgcgccagggtgtgacgcataaaacggccgaagggatcgtcgccgacgcggccgataaacccgctgtcaccgccgagccgcgccacgccgaccgccacgttggccggcgcgccgccggggcattgcagcaggcggccctctccatcgggcaggagatcgacgaccgcatcgccgagtacccagatttttccattcatacgacaagctcctctaagctaaactttattaaaccggtttagctcattaaagcacagcccaccggtaagcggaacgattgggtcacgaaacagggaggcgagggtaaaaaatgtgagccaggcggaatatttcgccactccagatctggacttttccttccccacccgcttaggtatagttcaccaggtcgcggttagccccgccgcggtggccaaaggtaaaggagtgcgtagcgcgatgaaccccagttttggcgatatttacgatcggtaccagaagctgacgctgactacacatctgccggcggtgatcgcctgcagtgaaacgctgagtttgggcaaagaccagggctttattccgcagccgggctatctctactttctgctgcaggggcaaatgacattggcctttggcgatgagcagaacctggtcgggattgttatcgcgcatatgccgttaggattactggaacattattgtccgtcggtcgcgctctattatcagtgtctgggcgagtgccagctggcgaaaataaccgccagcgattttgagcgaatattctttcattcgtcgccgggctatatgcaagagctgaccacgatcctggcctatatgggcatatttgcccttgatgcccactatgaacgcggcagccagaccagctttcagaccattaaatcgatgctgtcgcgctatttatatcgcggcgaaattgatgggggtcagcatgagagcctgtcggcatttattattaaacgaaccaatctctcgcgcagctatgtgtaccaggtgctggccgcgctgcgcgaggggggatatatcacggtgaaaaaaggcaagctgatctccatcgaccgtcatattcctgagaaattctaaatccgattcggcagattcacgccatcacgttgctattaccgccagggaaagcgctaagcgcgctttttcccccggccccgttacgcctgaatctggctgttttatttatttaaccttgcactctggagttattttatgaccctggactatgtggcgctggccattctgatcgccgtggccttaatacttttttatggcgtgattgttattcacgatattccttatgaaatcgccaaagagcggcgtcatcctcatcaggatgcgattcattatgccggttgggtcagcttatttaccctccacgcgctgtggcccttgttatggatctgggcgacgctgtggcgcgaagaccgcggatgggggatgcgccacattgccgacgagcagcaggcgctgcatcagcgtctggaaacggtggtccagcagctggaacaggtccagcgcgaggtggacgttctgaaagcgaaggaggcaaaataatggaaacgttaatgttgctgacctacgccgcgctatgcatcgtggtgtttaaagtttttcgcatcccgctcaataagtggaccgtaccgacggcggtgctcggcggtatcgccctgattggcgcggtgatcttcgggatgaactacaacttcccttataccgacgtcggtaaccaggtgtttcgcaccgtgccgattgtgtcgcaggtacgcggccgggtgcagagcgtaccggtgaagcctaaccagatgctgcataagggcgatgtgctgtttaccctcgacccgacgcccttccaggcgaaagtggacgatctgcaggcgcagataaaagcagccagtcaggatgcgctctccttaaacgcggcgttaagccaggcgcaggccgagctgagccgtgcggtggcccagcgcgaccagtcgcggcgggagtatgcccgctatcgggagggccatgcccagggcgccttctccgatcaaatggttgatacccgtctgcagacgtggaaagccgatgaagccagcgtcagcgcggctcaggcaaaggtggttcaggcgcgtaatgcgctggactcggtggtgaagggcaaaaacaccaccgtggcctccctgctggcgcagctgcaaaaggcgcagtttcagctggagaacaccgtcgtccgcgccccggaggatggctatgtcagtaccgtcggcttacggccgggcaccatgtccactgcgctggggatgatcccgctgatgacctttgtgccggtggagggcgccgcctcgcgggagtacgtcgcggcatttcgccagaacgccctgcagcgtctgcacaaaggcgagcccgcggagctgatgtttccggctatcccgggcaccgtctttcgcggagaagtggccgacgtgctgccggcgattggcgagagccagttccaggggcagggcaaactgctgaccacagacgcgctcaatacccatggccgggcgctggtggtgctgaaggtgaccgatccgcgttttgccgaatacgctctgccgcagggggccaccctcgaggcggcggtctactcggatcacctgaaagagctgtcgctgatcaggaagatcctgatccgcatgaaaagctgggaaaactatatctatctcgatcactaagccggcgggcgcggggcggacgaaccgccccgcgccgcggtcaggcctcgctgtccaccaggccgtcaataatcacctgccgcaccccctgcgaacagggttcaatacgcccgcgcaccccatagacggccgccagagtctcgggggtgatgaccgcggccggggtgccgtcgccgagcagctggcccgccttgagcatcagcacgtggtcggcgtgacgcagggcaatattgatgtcgtgcaccaccaccagggtcacgatgttgcgccgccgggtctcccggcgcaccagatccatcacgtgaaactggtagttgaggtcaagggcgctgagcggttcgtcgagcagcagcaggcgcggctggcggatcagcgactgggcgagacccaccagctgcttttgcccgccggagagctgatcgaggtagctcatcgccagatgggcaatccccagctgtcgcagcagcgccatcacctcctcctggcgctgcggactgtggcgtcctccggcggcgcgctgggcaacgattatcgactccagcacatgcagatgcacgccggcgggcagcgtctgcggaagatagaccacctgctctgcgcgacgtgagaacggctgcgtcagcagattttccccctccagcagcagctcgccgcggcaggggcccagacccgccatcgcccgcattaacgttgatttaccgctgccgtttggccccagcagcgcggtgattttccctcgcggcagatggggaaccgtcaggttctcgatcaccttgcgtctggggtagccggcgctgaagtgagacagcgacagcccggataatgtctggtcgctcatacctgcccccgatgacgtaaaatgatgctcaaaaagaacgggaccccgaccagggaagtgacgatccccaccggaataatggccccggggatcaggtttttcgaggcgatggaggccagggagagcaccagggcgccgatcagcgcgctggcgggcaggtaaaagcgatggtcttcgccgaagagcatccgcgcaatatgcggcgccaccaggccgataaagccgattggcccgacaaaggccaccgaaagcgccgacagaatgctgatccgcagcagcgtggtcaggcgcagacggcgaacgttaatgccaaagctgatggcccggtcctcgcccaaccgcagggcggtcagcttccacgcgctgcgcagcgacaggggcatcaccagcgccagggcgaccaacaggatggcgactttgctccaggaggcgcgatcgatgctgcccatggtccagaacaccagcccctgcagcgtgtcttcgttggcgatgaactgcagcatcgagaccagagcgttaaaggtaaagaccagcgcgatgccgaacagaatgacgccggaggtggccacctgggtccagcgggtgatgccgtccagcagcagggcagccagcagggcgaagataaaggcgttggccgagataaaccactggccgggaataccgggcaggccaataccgagcacaatcgccagcgcggcgccaaacgccgcagccgaggagacgccgagggtaaacgggctggccagcgggttattgaggatggtctgcatttcggcgccggccagtcccagcgccagaccgacgataatcgccatcaccgcatagggcagacggatatcccagacgatggcgcgcgtgcccggatcggcgctggccggatcggttaacgtctgccacaggttctgcagcggcagaccggaggggccgagcataaaatcgagcagcagcgacgcgacaatcaacagcgccagcaggaggatcagcagcagacggcgacgcacgatacggcgataatcattcatcacgccagaggtcccggcgggcagcccgtcgagcacggagtcggaggttaaacgcatgccggattactcgctctgctgccaggagaagacgaacggctggtccggcaggtcggtgaaatggcgcacgatataatggtacgtctcatccgggttgagatcgccgaaagcctgcgggtagatatctttcgccaggtattccatgccgacaatattccacgggtggttatagaagtggtgataaacgccataggcccgcttttcctgtaccgccgggatctggctgaccccaggccgcgccagcagcgtctgcgcctgggccttcaccgcctctggcttaaccgcataacccaggggcagcacctggctgttgccgcgcttcgagccggtcatgatccaggcgtcgggcttcatgctgatgattttctccagcgagacgaacccggaggcgcccggcagcagctgcgaaccgatattgttcgccccgaccgcctctaccagcccgccccagccgctgtggccatgagtaaagcagcaggcgtcgctgttgccggccagcgcttccacgaagacgttggccttcggcgtgatggccgcggttttctggcgaatcgtctgcagctgctgacgatagtaatcggtaaaggctttggcctggctctcgcggttaaggactttgcccagcaggtcgatgctgggggcggtatctttcgccgggtcgatctcatagtcgacaaacagcaccggaacgtgcagggcgctgagcttgtcgatgacgccgctctccatcagcgctggcctggcgcgcagctgggcgatcatcagatccggctgacgggcgatgacgctttcaagatcgacgttccctttatcgctgaagcccatgtcaaggatcgtggccgactgcggccacgtcgttttcagcatctgccaggtggcaacatcctgctttttcgccagattattccatgccaccagccgtttaaacggattgtcccggtccagcagggcgagggtcataatgtcgcgaccatcctgcaaaataatacgctgcggctctttggcgagggtgacctgccggccgtcaaggtccgtgaccgtcaggggatattgggttgcatagctgaggaggggcgtcgcgagcagcgcagtaagtaacagcgatcttactgattttcttgccataaaatgagttccgtttgccaatttataaatataatgattctgagaattattctcgagtaaacgtcaacggcaagtatatcaagggcaaatttcataaaatgtaacaaacatgttggaaattatgccaacgccgacagggcgcgcgcggcggcagcattttctgccaaggctggaggtcgaagacgtttttcaggctaattcctaatgtcatccccggttcgttgtgccatcctgaatgcgactcataacacgacacgtgagagaggatattatgaaaaaagcaatgattgcgttatcggctattctggttgcggctccggtttttgctgcgacaacacatgcaacagatgataccgtcgcggcggcgaatgccaacgccaacaccgctaaagagaagctgcatcaggcccagcacgagggcgaagagcagcagctgaaggcgaaacacgccgccgaaggcaagcaggacagcgtcggcagccaggtgagcgaaggcgcgcagaaaacctggaacaagaccaaagaaggcaccgagaaggggtgggataagaccaaagaggtcagtgaaaaaggctggaatgccaccaaatccggtgcggaaaagggctgggataaaaccaaaaccggcgccgaagaattaaaaaataaagtgactgaataagtcctttaacctgtctgaataaaggtcgcgaaagcggccttttttattgtccttcctcccgcagcctggctgttgcgcagcacagcaactgccgatgccaggaatcgtcctggttaaccagttactcactctttcttcacatttgcccggtacaaaggagctgaatcaggaggtgtaccatgaaaaagatgatttctctggcagtaattttatcctgtgtgctgagcgtcccggcctttgccgatggcccgaacgacggccatcgtccggggcaacccacggtgtggcagaacggtccggaccatgacgggcatgcaccgcagggcggacctgacgcgcatcatcagggcgaccatgaccagcgtggcccggatcgcgacggccatgacaaacgcgatctggcacgtcatgagcaggaccatttcgcctggcgcgggaacgatttccgcaaaggccacccggctccggcgccgttccgtggcgatgaatatcgcgtccgcgactggagcgaccgcggcctgccgcccccgccggaaggccatcactggtcctatatcgacggtaactatgtgctgatcgccgcggcgaccgggatcatcacctcgattctggtgagcggcgccctcggccactaaatgcgctgctccgcgacgccgggtcaggaaaagcctgatccggcgatggcgcactcgcggaaagctacggatccagcgcagcatccggccagtatttataaccattgatcgttgcctgggtggacagttctttttcggtcagatgataaacgttgaccttcgaggacaacgaggcggtatctgacgccacgccgctggaagcggcggcgatcggcgcgctgcagcccgccagcgcaacgattgcgagaaggaaaagcctctgtaattgcctgcccgtttattttatataacgctggatgtggccgtgcagggtagggtaaataannnnnnnnnnnnnnnnnnnnnnnnnnnnnnnnnnnnnnnnnnnnnnnnttattattcattgcgctgtgatgagtgaattattaaataagatgcgtccattccaggtattagaaatgctgcttgcataaacttttcatcgcgataccgtgataagtccttaatttatttcccggagagcggcatgagtgattatgtaattccagaaattaaagcgacggaagcggaaatgatttctatccgtcattatttacatgccaatccggaattaagtcttgaagagtttaataccagcgaactggtcgccagcaagctgacggaatggggctatcaggtgacgcgcggtctcggcaagaccggcgtggtcggcagcctgagcaaaggcgattctccgcgcaccatcggtttacgcgccgatatggatgccctgccgatcgaggaaaccaccggtttaccctgggccagcacggcgccaggaaaaatgcacgcctgcggccatgacggtcacaccaccattctgctggcggcggcgaaatatatcgcctcgccggcctgtcagttcaacggcacggtgcatctgatttttcagccggcggaagaggctatcggcggcgcggatttaatgattaaagacggcctgttcgagcagttcccctgcgaacgcatctttggcttgcacaacatgccaggcctgcctgtaggcaagctgggcttctacgccggcaacttcatggcctcggcggacaccgtcaaaatcacgattaccggctacggcggccacggcgcccaccccgagcgcaccgtcgacccgatcgtcgccggtgcggcgctggtgatggccctgcagagcattgtggcgcgcaacgtgccgccgggggaaacggcagtggtcagcgtcggcaccttccaggccggtatcgcctccaacgtcattccggagagcgcggtgatggagctgagcgtgcgggcgatgaagccggaaatccgcgacctgctgatcaagcgtattcacgagctcgctgactttaccgccaaaagctatggcgccagcagcgtagtggaggtttacgactcctatccggtattaaccaacagtcctgaagagaccgatttcgcccgggcgctggcgctggaggtgtttggccgcgaaggggtcctggagtcggtctcgccgatgaacgccagcgaggatttcgcttttatgctgcgcgaacgcccgggcagctacttcctgctcggcaatggcgagaaaggagagaagggcggttgcatggtgcacaaccccggctacgactttaacgatgacattatcaccatcggcgcgacgctgttcgcccgtctggtggaaaaacactgtcgctaatctctggagaagaacgcgaatgaaaaaatcactgttgctatggctggcattaatggcgtcgacgtcggcgctggccgaagggggaaaggagatccgcttcggcgttgacccgactttcgcgccgtttgaatggaaagatccgcagggcaagctggcggggtttgatatcgatttaggcaacgccatttgtcagcagctgcaggcgaaatgcgtgtgggtggaaagcaatttcgacggcattatcccggcgctgaaggcgcgtaaattcgacgcgatcctttccgggatgtatatgaccgagaagcgcaaagcgcagattgcctttagcgacaagttgtataacgggccggtgttcctcgtggcgcgtaaaaataccctgcaaggcaatacgccggaacagctgaagggcaaaaccatcggcgtggagcagggctcggcgcaggagacgtatgttaaccagcactggcggccgcaggggataaacattgtggcctaccagggggccgatagcgtggtgcgtgacctggagtcggggcgcatcgacggcgcggtgctctccgggatgatggccgactacagcttcctgcagcagccgcagggtaaagaattcgcctttgtcggcggccatctgcaggacgatacgctgtttggcgccggggcggcgataggtttgcgtaaagacgatgaggcgctgcgtcaggaaattaacggcgcgattgcgaagattcttgccgacggcacctataaaaaattagctggcaaatattttagctttgatgtttattccgggacataatgtcagagtgtacctgcgggcgtggagcgcccgccgtaagattccttttctgattatccaatcgacctcctctcctgacccctgtggttacctgagggaagcagaatataagctaaggagtactcggcatgatgacacgtcctttgggcaaaaccggattttccatcgccccattagtctttggcggcaacgtctttggctggaccatcgatgaaaaaaccagttttgctcttcttgatgctttcgttgaccacggttttgacgctatcgatacggcggatgtttattcccgctgggcggagggcaaccagggcggcgaatctgaaaccataatcggccgctggctacaggcgcgccccggcatgcgtgataaagtcaaaattttcaccaaagtcggctccgatctcggcctccccggccataaagggctcagcaaagcctggatccaacaggcggttgacgactctctgcgtcgcctgaataccgattatatcgacctctacttctcccactggccggatccgcaaaccccggtggcggaaacgctggaggccttccacagcctgcagcaggccggaaaaatccgcgcgatgggggcctctaacctcgatgcgatgcagctggcgggggcgctggaggtggcgcgtaagggcggcttgcctgcgtggcaggtgctgcagccggaatataacctctaccaccgctctgcgtttgaaggcgcgctgtgcgatctctgcgtcagccgcgatatcggggtggtgacctactacagcctggcctcggggttcttaaccggtaagtaccgccagccgtcggatctgacacagagccagcgcggaagcgggattggtaagtacctgaatccgcgggggatgcggattatcgataccctggcggcggtcgcggacgagcagggcgcgaagccggctgaggtggccctggcgtggctgatcggccgcgaaggggtgaccgcgccgatcgccagcgccaccagcgtggctcaggtggagagttttgcccgcgcggcggcgctgagcctgagcgcggagcaagtggcgcggctggacggcgccagcgcctgaggcaatccctcttcccggcggggagaggggggaaggctaaacatgacgcggaccgtaggccgggtaaggcgccagccgccacccggcaaaataacggcgcaaccggaaatgtccctgttcgcgctgcgcttagcagggctacagcttctatgttacttccgggccgattgcgctcccggttaattgtctgcgttatggcagtcatggtgcagggagcgcacagggggcggccagtcgccgccgccccctgtacccccgggctccggccagcaacatcgccgctgcgcggtaccttcgacttatccctgcaggcttcgggtcgggccgaggcagcgtccgtgcaaaacacggccctcagcccgcatccatgcgggctgccccggccttccgggaacgtctcagcgatgttgaggccgcaacaccggcagtttcagtcgcactagtgggtaagttaacggctggctgctacggaccgtaggccgggtaaggcgcagccgccacccggcgaaatgacgggtgcggtgcctgaaagcgtgcccggcggcgccctactattcctgatggcgggtgacgttgaggatcttcgcgctggcgccgaccgggaaattgctgagggcgccgaaatcgctgccctgatagcccatgatcttgccgtcagtgcgcatctgctgcagatcgatgaggatcacccccagcgtgggaatgattttctcccgccagacgaacaaatagagatcctccgccacctgcacatagtggcagcgatcgacatccgccagccccttttccacgccgtccagacactgccaggcgtaaaaattatcgttgagatagatgtgctcatagcgctcggtcgggctataggtgtactgattgcgcatgccgaccagcgcggtggtaaagcccggcaacggccccggctgggcatccaggcgggcgaagacgaaacggacctcaaccgcggtcagcggcaacccttgttctacccggctgaaggcgtccagccgcgcggcggcttcgtccggtagctggccgtataccagcgtggcattgcgctgcgtcaggttgcataccgcgctaatgctggcgctatcccgctccgggtcaaggaagtcgataaacagaatgtccgggcgcagggcggtcgcccgccagggggcgcgcttgccgttccagcttagcgtctgctcatcttcgataaccagctgttgcggctcgctcccggcgacataaaaggtaaagttttcgcctgcgggcaggctggcggtagccagcaggttaccgtgcggcgcaaaaccatcggccagcgcgccgacctggataaatacggcttctgaagtcatagggctcctgaacagagtagggcgttaggcaaacgccagagtgggaacatcgacgatactggccccgccgtcggcgaccagcgtagcgccgctgatgatggcggcctgcggtgaacagagaaactgacaggcctcggctatctcctcggggctggcggggcggcgcagcggaacgtcgcggcacacccgctgataagcctcagtcagcgacagcccttccgcctgcatcagcgggtgcatctcttcatccgccatcggcgtcgtgacccagccgggacagacggcgttagcgcgtaccccctgggggccataatcgcgggcgacggagcgcatcaggccgattaaagcgtgtttggcggtgacgtagccgcaggcctgcggcccggcggccagagaggcgatggaggcgacaaacagcacattgccgcggcgggcaatcagcgaaggcagacaggcgcgaacgctggcgaaggcgctggtgagattgccgtccagcgcctcgcgccattggcggtcgctggtctcggcggcggggctgttgcccatcccgccggcgctgcagatgaggacatcaatcccgccggtctggtcgaggatggccggcagcagccgctggcgccacacctcgccgtcggcggcatcgcccaccagcgccgtggcgccggtctcattggcgacagcctgcagcggcgcttcgcgccgtccggtaataaacacccggtcgcccgcggcgcgcatcagccgcgcgcaggcggcgccaattccggttccaccgccggtaattaccacgactctcgccatccgcactctcctgtaatggggtttccgattaccttaaaaagcgcgtcaggtcccggctatcgcccggaagaacgatagccgtggtggttaatggatctcgctcacagggatcgcctgcggcgcaggcaccggcttcatggtggcggggtcgactgccagatagcgcccggttttgctgtcgatgccgacgtagtcgatcatcttgccctgtgcccgggtgaccatggtgcgcttagcaaatgcctcgtaggcctcgctcatggctttgacccgatcgggatgttcggccgcgacatcatgcgtctccagcgggtcgtcgtgcagattaaacagctgccacggcgcgtcgccggcggtgaggccgcgcggcaccagccgtcgcagcttccattcgccatcgacccaggccgcctgatgatgcagttcaaccccgtagttgccgcgcggcggctcctgtacttcgccggtgagatagcgcttaaagctgacgccgatcatcggcaacaccggctttttcgccagcgacttgttcggatcgatgccggcgaattcatatagcgtcggcgccacgtcatacaccgccatcgtcgaggcgtcgattttaccgtggcgggtgatcccgggaccggagatcataaagtcggtattgatgccgccctgggcgctggtggttttgtgataattggcgtagggggcgttgctgacgttggcccagtgcgggccgtaggagacaaatgatcctttgcggccgacgttgtcatagctgttatcgaactgcttccagaattccggggtagattcgtagtagaaaccctgcgccgggttggcgccgttatcggttaaaaagaccagcagggtatttttatcgcgcccggtttgtttcagcgtctccatcagggtgccgatttgcgcgtccatattggcgatcatcgccgcatacacctgcatcactttcgccgtatatttctgctgctctggcgttagcgcctcccactctttatccagctccagatgcggcagcggggtatcgtcatgcataattcccagcgctttcaggcgggcgatgcgctggcgatagacctctgcgtaaccctgctcatactggcctttgaagcgcttaatccactcgtccggcgcctgcaggggatcatgaggggcggtgaaggccagccaggcgaagaccggctgttccttcggcgtcgctttaatccagctgttcatctggcgggcgtaggcttcgctggagtaaaaatcatccggtagggagacgcgctcgccgtcgcgggtgtagtaggtgtggaaggcttcaacggtccccagcggtatcgcgtcgttaaagtggctggtgccgccgcccataaaggcgaaggcgtgattaaagccgcgatctttcggcgtggcgccgggaacaaaaccgaggtgccatttaccggccatcagggtgttataccccgcgtctttaaagcgctcggccatggtggtgacgcggtcggtcaaccgcagctcgtagccttccttgccaatggtgctgtcgtaccaccacatgccgcccatcccagcctgctggttactgttgccggtgagcagcattgagcgcgccggggccgacatcggcgaggtgtaatactggctcatgcgcattccctgctcggccatcgcctgcaggttgggggtggggatctcgccgccaaaggggctgatgtccgagtagcccatatcatcggcgataatcacgatgacgtttggacgctcctgctgcgcggcgtgcgcgccaccggcgaggatcatgctgaccgccgcggccatggcttttttgttcacgactgactctcctgttcagagggggatatcatcagggtaaggcgctacgcagtatgcgcagtcccaacaaacgcggcccgccaggccttcaggccattaaggtcgcgggaaaaggggcgtactggcgcgaggatgtcgctaaagaagcggtagtagcctccgcagaggcggttgttgcctgcggcgttgagatgcgccgggcagccgccctggcagaccatttttaccgagcaagtctggcattcgcggcgcagacttttctgctgaccgaacggcagttgcaccgaggcgtcgaccgcggcggcgagcgtctgctcatcgaggcggcccagccgatgttcggcgttgatcaggtggtcgcaggcgtagagctgtccgtcgggctccatcaccaggttgctgccgcagcgggcgctgtgcacgcaactgccgctggtatgagtgaaatactgcgcccacgcctgttcgatattgataacgaacacccgccctctatcgcagcgcttccgccactgtcgccagatgccgaccataaaacgtccccagttatcggcgctgagctggtatccttcgcgcagggccgcgccttcgctcatcagcggctgaaactgcagatagcgcgcgccgaggctgaccagccggtcataaatcgccgccgcgtgggccgccatctcgttatgcaccaccaccagcagattaaagtccacctgatgctgatggagcaggtcaatgccgcgcagcgccgccgaccaggtcgaccggccgcgtttatccggacgatggtagtcctgcagcgcttcgttgccttcgaggctcaacccgataataaagccatgttcgcggaacagtcggcaccatgcgtcgttgatcagcgtcccgttggtctgcaggctgttgctgatagtcacgccgtcgggggcatagcgctcctgcagggcgagcgcttttttgtagaagctcaggccggccagcagcggctcgcccccctgccagacaaagttgatttcccgcgcgccggcgggctgggcggcaatatagcggcggataaactgctccagccgcgcgtcatccatcttgttgaccggcgtttcgtcctgcgggtaatagcaatagcggcaggcgagattgcaggcggggccaatcggcttcatcagaatatgaaacggcaccggcgagcgcggctcagcggccagcggaatttgctgctggcgcagggcggcgatattcagcatcggcttatcctcggttaatgaccggtgctgttgatattattttggcaacagcgggtctggcgtaatcacatgattaagccgcggcgaaaattaattgcatcctgttaagggtataagtgaaaaaaaacaaaaatccatcgttctttaggatgagaatcacgcgtcgggaatagggtttttttatcaccaggggcaggtacgccgggtgttaatcttatttgtttatgttttaacgccgctatcgtaaagcatggccggggtgttttttaaatgctttatataacaatgtattgctgaaaattttgtaacggctatcacattgttaatatgttaatgattgtgttacttaaatgtgaaatgtatgcttcaattatcagtagtcatccatgtgtcatgtaccatcatctcgacggggaggccctatcatgtctgctttgttaaaagccagccgtaatgatgcgataatagcccgttgtttacagactatttcccagttaattccactaacttcagcggtgttttatcgagtaaataatcgtttaaaacccgaaaactatatattgcataatatttccgataatacgcaccaacaatatctggaaaacttccagccgctggatccgcttctgccgtcgcactttagccaccagaacaccaccgtggcggcgatgacgccgcggctctgcgaccgcaaccggcattactatcatgaatttatgttgccgaataacgtgcgcgacatgaccgagatctttatccgccgcgagcggcggatcgtcgccggtatctcgctgatgcgcgacgtgcctttctccagcgaagagcgccagcgggcccaggcggtgctgccgctggtagagctggccattcgcgactgcctgcaggaagaagatgatctgcccgccatcctgacggcgaaagagcgggaaatcgtcggcatggtgcgcgaaggcgccagcaataagctgattgcccgccagctggatatctcgctctcgacggtaaaaacgcacctgcgcaatattttcgccaagaccgaagtggtcaatcgtaccgaactggtttcccgaacctggatgccggccgctcagcgtacgctgcatctgtaatctgactttcgcatcccgcgcgcgccgtggcagcacggcgttttcctgatgcctgtgggtatcactccctggaggatcctccgggggaggcttttttgaccggagcacgccctacgatgtcgagtacacctctcactgataatgcgctttcccggcccgccgggctgatggtgtccctgcgtttgctggcggcgatcgtgatttttgccgctattgcgccgggtattctgatgaccgcgccggcggtggcggcgcagctggccagcgaatggcagctaaaacccgggcagatcggctggctgttctcagcggagctgggggcgatgagcctggcgacgctcccggcgtggtggtggatgagccgcctcgactggcggcgggttgccctgacggccggggtggtgtttctggccgccaacctcgcctcggcggtggtcacccagtacgagacgctgctggcggcgcgctttatcgcctcgctggcgggcggcacgttgatgattttgtgcatcagctgcgcggccggaacgccgaacccgtcgcgggtctacgccttctgggtgctcgggcaactgctgttagggatgcttggcctgctggcgctgcccggcctgttcgcgacctttggcctgaaggtggtgtatctgatcctcgccgccatcatgctctgctgtttgccgctggtatccgctttccctccgcgctttcaaccgctttcagtctcccgccagcagccgtcgacggcgctgtggcgtcaggcgctggctgtgctggcggtgctcactttctatatcagcctcagcgccgtgtggacctttatcggcaccatcggcagcgcggcggggctgagcccgacgcaggtcggtctggtgctggcggcggcgacggtttgcggcattatcggcgccggcggcgcggccctgcgcggcacccggcgggccgatcgtttaccggtgtggctgggctacggcctgttgatcgtcagcgttgggctgctgatcggccagccgctgctggtgcgttacgccatcgcggcgctgctgtttaagttcacctggaccttcgtgctgccctttattctcgcccgcgtggccgggctcgataacagcggtcggctgatgaacagcatcaatctggtgatcggcggcggcatggcggctggcccggcgcttgcgggggccttactgcaacacttcgccagcgccgacccgctgctggcggcggcaggcgtctgcgcgctgctgtcactgattttaattgtggcggcgtccgccgccgggaaggcttagcccacgggaggatagagtgaaaagaaaaaccggtttcttctttgatgaacgttgtttctggcacagtaccggtctgcacgcggtgacgctgccggtgggcgggtgggtacagccgcccgccggcggcggtcatgctgaatcgccagagaccaaacggcggatgaaaaacctgatggatgtctccgggctgacgccgcagctggcgctgcgcagcgcggcgccggcgagccttgaggacctgcggcggatccaccccgacagctatctggagcgcttcaaggcgataagcgataacggcggcggcatgctcggcaaagaggcgccgctggggccgggcagttatgaaatcgcctgtctttccgccgggctggcctgtgcggcggtggaagcggtgctgaagggggagctggataacgcctattcgctgtcgcgcccgcccggacaccactgcctgccggaccagtcgatgggattttgtttcctcgccaatattcccattgccgtcgagcgagcgaaagcgcagctggggctgggcaaggtggcgatcattgactgggatgttcaccacggcaacggcacccagcatatctacctgcagcgcgacgatgtactgactatctccttgcatcaggacggctgcttcccgccgggctacgccggcgaggacgatcgcggcgtgggcgcgggcgaaggttacaacatcaatattccgctgttggccggggcgggggatgacagctggcgctatgcgctggaaactatcgttattccggcgctggcgcgttttgagccggagctgattattatcgcctgcggctatgacgccaacgccatggatccattagcgcggatgcagctgcacagcgatagcttccgggcgatgaccgaacaggtccagcaggcggcggatcgcctgtgcggcgggaaactggtgatggtgcacgagggcggctacgccgaatcctacgtgccgttctgcggcctggcggtgatggaagccctgagcggcatccgcactgaggtccaggatccgctgctggaatttattcaacagcagcagccgcgcgccacgttcgcgcagttccagcgccaggccatcgatcggctggcgcagcagtttggtttgctataaaccacctcagcttccccgcggtgatggcggggaagtcaatgctttctcttctgcgatttcaccgcgcatccactgacttaccgcctgattaatcatcgccagcacgctgagcagcagcatccgctgctgggcttccagccgcagataacggcgcagcggcggcattttacagaccacttcgctggcggcccagggttcaatgccgcagcgccagccgctatcgtcaaaggtcaacgaaaagcggcggtagtccagctcgcttaaggtctgctggagattaggaaaaccgttgagatagccagcgagttccgcgctctctttactgccgataaagcggattggcaggcgttttagccagccggattggtgggcgcggatcttgccgcgagcgggccgggtcaccggcccctcgacgacaaactcgcagctgtgaatgctggccataaacagccgcttctgacgcacgctgaaggtgacggcggtggcgtcgttcaagcgcagcagcgcgctgcgttcgctcagcttttcactgggccagcccgccagatcgcgctgcaccgcgttcattaacggcgtttcaaaccaggggacggaggacatctggcgtcatctccccgcgggtctgtttttcataattgttgatggcgcgctccaccacctcttccactaccagcggcttgaacggattgacgcgctgcacgcacaccgtccagaacagggcgtaagcggcggtcaggccgagcattatgccgaacggcaccagcacctggcggctgtccatcccgggcggcgtgatattgacgatagcgatgatgatcccgacgctggagataatctgcggcagcgggaaccacggcgagcggtaggcgcgcggcaggtccgggcggcgaatgcgcagcatcaccaccgacagagtaaccagcagataggcgacgccccaggcgcagaccgcggcgaggatcagcggcacgatgcggtccagatcgccgttcagataccaggcgtgcaggcaggggatcgccaccccgatggcaatggcgatcaccggcgtcttaaagcgcggatgcagccaggtcaggaaacggggcagcgcgccgtccagcgccatgccgtagataatacgcggcacggcggccatcagcgtattgatggtggcgcagccggccaacagtagcccgacccccagccagtactggccggcgtggcccatcacccgttcggcgaaggccgggatcgccatcggtgtatccagcagatggacgttgttggccgcgtcgagcacggtattctccacctggcggttgatcgccgcgccgtagataaacatgcagctggcgacccccagcaggcccagcgccatcgcccgcggtatggtgcggtgggcctgtttgatctccggcgccatcggcgtcaccagttcgcaaccgacgaacataaacatcgccatgccgatatagccgaacaggccgttgatatcgctaacgttcagcggcgtgccgaaccagccggaaagatgagtcaccggcgccataaaaatgccgcacaggccgaaaatggtcagcgtggtccacatgccgaaggtcagcatcacttcgaccttgccgaagatttccacgccgatggcgttgagcaagccgaaaatcaccaccatgccgacgcccaccatccaggtattctggtgagcggccatctgggcgttaatcgactcgaagttcaccagcgccataatgcccgccaggatcgtctccgccgtcccggcgaagatatggacgatcaagtaggcgcacagcgcgccggtgatagcgaagaagcggcccatgccgcaggagatatagtcgtacaccgaaccggtggtgggaatgagcgtcgccgcctcggcaaaggtggtgacctgcgcctgcatcataataaaggccagcagcaccgccagcgcgaaggtatcaccgcccatgccgaagccgctggtgaccgtcaggatcaccgggctggccatgatcagcccgacggagctggcgagggtggtcgggaagccgacgacgccgcgctcaagatggctggcgagtctgttactaaacatagtcaacctctgcacaataatggggtagggcagggaatagccagcgccactcccggatagtcataatttaggcgggcatcctgctcaacgaatatcgtccggaaggtggagggcggcgcatgattctgtgacgcagtcgatgaatgtcgcggcggataaacaatatgaccccgaaaaccggggccatccgtcttgccacgttgcgcctgtttctgccggatggcggctgcgccttatccggcctacggtccgtgcggcctgcctttaatttattcaccatgctgactgaaactgccggtgttggcggcctcaaaccccccggtggcgctgccgcttaccggggctacagcgctgcgcgatttggtagcccggagaaggcgtaatgcgccgccgggcattatcagtttgttagcgggtctcgacgttcgccaggtagtgcttcacaaagcgcggcgtcagaattttccactccacttcggtgccctgtttaacaaaccagctgtcgcccggcgcaaagcgctgcggctcgccgccggcgacggtcagctccacttcgccctccagcacggtggcgtgctcggtaaacggataggtcatggtaaagctcccctcagtggacgaaaacagtccgcaggtaaaggcgtcctgcggctcgccgtagatcatcgcgcccgctacctgcgggtcgccggcggtcggcgtcgcgccgagcaggctgacgctgccgatcggctgcagatcaggtaccgggtgtttaagtttaaaagcgtgcatagcgttctcctggttaactccggcctttccagaaaccggcggtttgatgcatcagttttccggccgtgactaataacagacgcaggctgtcacgaccgtggatggtcgcgtgggggatgctgctcagcaggcgatagcggtcggaaccgccgttgatcccttcggcgaggattttgcacacgatgtgcgacggggtgacgccgaagccggagtacccctggacgtaaaagacgttgttgtgatcgcgtagggtgccgatctgcgggaacagattggcgctacaggccatcggcccgccccacgcaaaatcgatcttcacatccctgagataggggaagacctccgccagcaaggtgcgattccaggcggcgaaatcgttcggcgtatactccacaaagcgggtggcgctgccgaacagcaggcggttttcccgggtgacgcggtagtagttaattaccgggcgaatatcgctgaaggcgccgcgtagcgggctgatgcgctcgatcagttcatcggagagcggctcggtcgacacctggtaggagtaagtgaccagcgtcttgttgtagatctccggctccatattgttgaggaaactgtcgcaggcccacagcagtttggcggctttgacgctgcccatcgcggtgcgcacttgtacctgtttgccgtaattcacttccactaccggtgaggattcgaaaatcttcacccccagcgagtgggcggcctgcgccgaaccgagcagcatattgagtgaatggatctggccgccgcccatatgtttcagcgcgccgcagtagacctcggagcccaccacctgctgcacctcttttccggtatacagttcgatctcttcatccggggtagcggctttaaactccttctcccactggcgcagcgttttaagctgtcgctggttataggcgagatagccgtagccgggcacgaaatcggcgtcgatgttgtatttgcggatgcgttcgcgaatgatgcccgcgccgaggttggcgattttaaacagcgtctccagcccctctttgccgacgtgcttttttaccgcttcgatatcgtggccgataccggccatcacctggccgccgttgcgcccggtgccgccgtagccgagatggcgcgcctccagcaccaccacgttggtgatcccctgttccgccagctcaagggcggtgttaatgccagagaagccgccgccgataattaccacatcggcttcaatatcttcccgtagcgccgggaaatggaggtgatatttcttcgtcgcgccgtagtagttcagcgcatcgatcttgatgttcatcgcgttaccctgtggtcttgcctggctcaagaccctcatcacagcacgccgcgcgggcgttgaatatcgtccggaagaatgacgttctttagaacgataggctgcggcgggaagccgtgctgtgatgggttaactttgctgaaaaacgggtgctgacgatgagcgagataaccttactggcggaagtgaccgctttcttacgccagccgcacgggcagtttattgccggtcaacgtgaggcgggccgcggcgcgccgttcgcggtgatcaacccggcgaccgggcgggcgattgccgaggtcaccgcggcggatagtgaccaggcggatcgcgctatggagagcgcccgccaggcgtttagtcagtggcgcgagatgccgacgctggcgcgcggcgcgctgctgctgaagctggcggacacgctggcagagcatcgcgaagcgctggcgcagctggaaagtctctgttccggcaaaactatcacgctggcgcggatgctcgagctggaccagtcggtggcgttcctgcgctacttcgccggctgggcggggaaagtcaccggtgaaacgctggatgtctcgctgccatcgatggccggggagaaatataccgcctttacccgccgccagccgcttggggtggtggttggcatcgtgccgtggaacttctccatcatgattgccatctggaagctggcggcggccctggtctgcggctgcaccatcgtcctcaagccgagcgaatatacgccgctgacgctgctgcgcgtggcggagctggcaaaagcggtgggtatcccggatggggtgattaacgtggtcaacggcgccggcggcgagattgcccagcggctgattacgcatccggcctgcgccaaggtgagcttcaccggctcggtggccaccggtgaaaaagttcagcagtcggccagtgcgtcaggtaaacgggtgacccttgagctgggggggaaaaacgccgcgctgttcctcgatgacctgacgccggaggcgatggtcaacggcattattgaagctggctacctgaaccaggggcagatttgcgccgctgcggaacgtttttatctgccgcagggaaaactggatgcggtactggcgctgctgaaagacaagctcagcgcttttgcgccggggtcgccgctggatgaacggacgctgatggggccgctggccaaccgccagcagtatgacaaagttttgcggctcattcagaccgcccgcgacgagggcgataccatcgtctgcggcggcgaagcgctgccggggagggctatttcctgcagccgaccgcggtcaaagtgcgcagcgaagagagcaccctgatgcgggaggagaccttcggtccggtgtgcagttttatcggctatcgcagtgaagaagaggcgctggcgcggatgaatgcctcaccgtatggcctggcggccagcgtctggtcggataatattcgtcaggcgctacgctactcggaggcgattgaggccggcatcgtatgggtcaatatgcataccttcctcgacccggcggtaccgttcggcggcatgaagggctcgggcatcgggcgcgaattcggcagcgcgtttatcgatgattatacggagctgaagtcggtgatggtgcgatattaatcgccgttcagcgacatagcgctgtcatgtgtcgctttgcgccagataggcaacacattgtgtgccttctggcccgcaacccgggcggtgcacggcatcgcttccgggacgcttttcccgtcacggatcctttcttcccctcctaatccgccattgccgtaaaaaaaatcagcagattatcttttttgcccgccaggacttgtttgacattagataatgagtatggttctcattctctttttcattcgtaattttggcaaggttcgagctgcgccagtgagtcgttcactaagagtcgcgaaggcgtagggtgacgtaaagacagcaggctggaaacacacaatatcggccgctgcgcgtccatcgggtcattgattttttatagggttgatccaatgaaatacacacttccggcgttgacgctggccatcagcgcggcgttaagcggctgcgcgacgcctcattcctctgccgtttcccaaccggttgtcgactcgccagtccctaacgtggcgcaaccgctgcagcgccagctagcggaagggctgtacgagatggcgttaagcccgcagggtgatgcgctgtacgtcgccagcgccgaaggctttaaaaatgtgcagggtggggcggtctacacactggatccgcacaccctcaataccatcggcctgacgcataccgatctgaaaaacttcgctttacagctctctgcggagggtaaaacgctgtatgtcagcaattcgctggacggcggcatcagcgctatcgacaccgccaccggcaaggtaaaaaaccgcctgctgttcagcgagcgcaatgaaaaaggtcgcccttatggggcccgtcagctgctgttgctgaataatactctctacgttggcgcggtcgccgacccggcgcaaatctgggtggttgacgccactaccctgaagctgaaaacgcggattaaaaataccggtaagtggatgaccggcctgcactactccgcgcaaaccggtcgcgtgtacgccgctaacggcagcggtgaaattctggtgatcaacccgcgtaaccaacgcattgaacagcgctggaagccgctgggcgacaagccggcgctgctgcttaatatggccgaagatagcgacaccggccgtctgttcgtgaccgacaactcgaaagcgaaaaccactctggtgctggatatccacagcggcaagctgcttaaacagctcgacgtcggcgattcgctggcggtgcagttcaataagaaacgccacgaaatttatatttcacagcgtgaatccggcaaggtcatcagccttgacgccagccgctacacgctgaagaaaagctgggcgctgccggccaatcccaacagcctgctgctttccgccgatggtcagacgctgtttgtcaccgtcaaacagcccttcaataaagaccactccactaaaggcccggacagcgtcgtacgtatcgacctgaacgcgcaataaaaataacgggtccggcgacgggccctttgattcatttatcctcatccatggggcaaattatgcacaccacgcactattcatccttcccgctgcgtaaaacgctgctggccttagccatcggcgccgccagtcaaacggcgatggccgcggacgctgccgccgcgaagcagcctggcgaagagaccctcatcgtcgaggctaacgaaaccagcgattttaaatccggcggcgacctggtggttccggcattcctcgatggccagatcgcccacggcggccgtctggggatgcttggcgaacaaaaagcgatggacgtcccgtttaacgtcatcggctatacctcgaagctgattcaggatcagcaggcgaaaactatcgccgatgtcgtcagtaacgacgctggcgtgcaggccgtacagggctacggcaatttcgccgagacctatcgaatccgcgggtttaagctcgatggcgatgacatgacgatgggcggcctggcgggcgtggtgccgcgtcaggtgatggacacccagatgctggagcgcgttgaaattttcaaaggggctaacagcctgcttaacggcgcggccagcagcggcgtcggcgggatgattaacctcgagccgaagcgggcggaagatctgccgaccgcacgcgttggcgtcgactatacctctgattctcaggtgggcggcaccctcgacctggggcgccgtttcggcgacaacaaccagttcggcgcccgggtcaacctggtgcaccgcgagggtgaaggcgctatcgataatgataaacgccgtaccacgctggcttcgctggggcttgattaccgcggcgaccgtttacgctcctcgctcgatttcggctatcagaagaaaacgttccacggcggtacgatgggcgtcaatatcagcggcgtggatttcgttccggcgctgccggacaacagcaaaaactacagccagaagtggggctatagcgatattgaaagcgagttcggcatggcgaaggcagaatatgacctgaccgatagctggacggtatacagcgccctcggcggccagcattcgcatgaaattggtacctacagcgcgccgaagcttctgaataaaaacggcgatgcgacggtgggccgcctggatactaaccgcattatcgacgcgatcagcggcatgggcggggtacgcggcgatttcaataccggcgcgatttcgcataaggtgaacctcggctatgcggcgcaggtgcataccgatgcgaccgcctggcggatgtcggccagaaacccgaccactaatatctttgacaaccatgatgtggcgatgccggataacgcctattttggcggcaactaccacgatccgctggtcacctcgcgcagccgtacgcagggctggctgctgagtgataccctcggcttctttaacgataaagtgctgtttaccgccgccgctcgtcatcagaaagtggttgtgcgcaactacagcaacgccaccgggctggaagatacctcttcgcgttatacccaaagccgctggatgccgacgtttggcctggtgtacaagccgtgggagcagctgtcgctgtatgctaaccataccgaagcgctgcagccgggctctgtggcgccgacgacggcggccaatgccgggcagagtaccgggatcgcgcactcgaagcaggacgaagtgggcgtcaagatcgactacggtacgatcggaggatcgctggcgctgtttgaaatcaaaaaaccgaacgccatttccgataccgctggcaattacggcctcgatggcgagcagcgtaaccgcggcgtagagatgaacgtctttggcgagccgatgctgggactgcgtcttaacgccagtaccgtctggctggatgccaaacagactaaaaccgctgaaggcgcaaccgacggtaaagatgccatcggggtggctaacttctacgcggtactcggcgccgaatatgacatcaagccggtggaaggcctgaccgccaccgcgcgcgtcaatcatagcggctcgcagtatgccgatgcggccaataccaagaagctggatagctacaccaccctggatttaggcctgcgctatcgtatgcgtctgaacgccgaccagaacgaaatgatctggcgcgtcggggtgaccaacgtgaccaacgagaagtactggtctggcattgacgataccggtacttacctgttcgaaggcgatccgcgtaccgtccgcgtctcaatgagctacgacttctgacgctaaaaaaagcggggcgggcggctgacgctcgccccacgcaacttgcgacaatcccccctaagtgataaaaggtgccccttcgcaaaaacacacaggggaacgacgtgaaagacgcgtcaacgtcgtcggatgccgtagaagagagcggcccgacgcttcatcgcggtttacagaaccgacatattcaacttatcgcccttggcggcgcgattggcaccggcctgtttctcggcattggtcccgcgattcaaatggccggcccggcggtcttactgggctacgccgtggccgggattgtcgcttttctgatcatgcgccagctgggcgaaatggtggtggaagagccagtatccggttcctttgcccactttgcctataagtactgggggccgttcgccggctttctctccggctggaactactgggtgatgttcgtgctggtagggatggcggagctgaccgccgccgggatctatatgcagtactggcttcccgacgtgcccacttgggtttgggcggcggctttcttcatcattattaacgccgtcaacctggtcaacgtacgcttgtatggcgaagcggagttctggttcgcgctgatcaaggtgctggcgattatcggcatgattgccttcggcctgtggatgctgttcggcggccacggcggcagcaaagccgggttcgacaatctgtggaaacacggcggcttcctcgccaccggctggcacggacttattctgtcgctggcggtgatcatgttctccttcggcgggctggagcttatcggcatcaccgccgccgaagcgcaaaacccggaaaagagcattcccaaagcggtcaatcaggtggtctatcgtatcctgctgttctatatcggttcgctggtggtgctgctggcgctctacccgtgggtggagatcaaatccgacagcagcccgtttgtgatgattttccataatctggacagcaacctggtggcctccgcgctgaacttcgtcattctggtggcctcgctgtcggtgtataacagcggcgtgtactccaacagccggatgctgttcggcctgtcggtgcagggtaatgcgccgaaatttctcgcccgcgtcagcaagcgcggcgtgccggtgaactccctgctgctctccggaattatcacttcgctggtggtggtgctgaactacctgctgccgcatgaagcgctggggctgctgatggccctggtggtggcgacgttgctgctgaactggatcatgatctgtatggcgcacctgaagttccgcgccgcccagcgccgcaaagggcgcgaatcgaagttcaaagcgctgctggcgcccgccagcaactacttctgcattgctttccttgggctgatcctggcgctgatgtgcactatcgacggcatgcgtctgtcggcgatcctgctgccggtgtggatcctgttcctgtttatcgccttcaaactgctgcgccgcccggcgtaagcgagatgccccgccgtccggcggggctgcctgcctttttattgtgatcctcttcgcaggcggcgcatttgcctggcgatcttctttttgtaatcgattacttttgttttgagtggttttgtaatcgattacttttctgagggcgagcaacatggtcacaacaacagaaggtcgggaaagtgttcgcgtgagccaccgttttctggtgccgcggctgtcgttaatgatgtttatgcagttttttatctggggcagctggtcggtgaccctggggctggtgatgacccgctatgagatgtcattgctgatcggcgatgcgttctccgccgggccgatcgcctcaatcttgtctccctttgtgctggggatgctggtggatcgctttttcgcctcgcagaaggtgatggcggtgatgcacctggccggggcggcgatcctgtggtttgtcccgcaggcgctggtggcgcagaacggcgccctgctgattggcctgctgttcggctatacgctgtgctatatgccgaccctggcgctgaccaacaatatcgccttccacagcctggccaatgtcgataaaaccttcccggtggtccgcgtgttcggcaccatcggctggattatcgccgggatctgcatcggggtgaccggtatctctgataccaccggcatcttcacgctggcggcgctctgttcggtcgcgctggcgctctacagcctgacgctgccgcacaccccggcgccggccaaaggcatgccggttcagtttcgcgacctgctgtgcgcggacgccttcgcgctgctgaaaacccgccatttcctgattttctccctctgcgccaccttaatttccgtgccgttaggcacctattacgcctataccgcgtcgtatctggcggatgccggcgtcaaagatgtcagcaccgcgatgtcgttcggtcagatgtcagagatcgtctttatgctggtgatcccgttgctgttccgtcgcctcggggtgaaatacatgctgctcatcggcatggcggcgtggttcgtccgctacgcctttttcgctctcggagtcagcgaggaggggcgcttcctgctctatctgggcattttgctgcacggcgtgtgctatgactttttctttgtcgttggctttatctacaccgaccgcgtggcgggcgagaaggtaaaaggccaggcgcagagcatgattgtgatgttcacctacgggatcggcatgctgctgggctcgcagatctccggcgcgctgtataaccatctggtggccggccagagcgtgcctcaggcctgggtgaccttctggtggatcccggcggtggccgccgcggttatcgcgctgattttccttttctctttccagtacaacgagaaagagccgcactaatttttcaggagggggtatgaaaacgattaagggaccgggcatttttctggcgcagtttatcgggccgcaggcgccgttcaacaccctggcggggatagcgcagtgggccgccggcctggggtacaaggcattgcagatcccctgcaaccacccggcgatttttgatgtcgagcgggcggcggcgagccagacctactgcgacgaggtcagcggcatcctggcggagcatgggctggtgatcagcgagctgtccactcaccttgaagggcagctggtggcggtgcatccagcgtatgacgcggcgtttgatgcctttgccccggcggcgctgcatggcgatccgcaggcgcgccagcgctgggcggtggagaaagtgcgccaggcggcggtagcctctggccgcctggggctgcaggcgcacgcgaccttttccggggcgctggcatggccctttttttatccgtggccgccgcacaatcagccgcttctggatgaggcctttgccgagctggcccggcgctggcggccgctgctggacctcttcgacgagcagggggtcgatgtctgctatgagatccaccccggcgaagacctgcacgatggcgtgacctttgagcgttttcttgcgctggtggataaccatccgcgctgcaatatgctctatgacccgagccacctgcatctgcagcagatggactacctgacctatatcgatatctatcatgcgcgtattaaagcgtttcacgtcaaggacgccgaatttcgccgcaacgggcgcaatggcgtctacggtggataccagccctggcagcagcgggccgggcgtttccgctctcccggcgacgggcagatcgacttcaaaggggtgttcagtaagctgaccgaatatgattttgccggctgggcggtgctggagtgggagtgctgcctgaaggatagtgagaccggcgcgcgcgagggcagcgagtttatccgccgccatatcattcccgttgccggacgggccttcgatgactttgccgccggcgggagggaataacatgattcaggtcgcgattatcggggcagggtttattggcccggcgcatctggaggcgctgcggcggctgggagatgtcgaggtggtggcgctgtgcgacagccgccttgaggcggcgcagcgcaaggcgcgagcgctgaacattgcccatgcctacgacagcgtggaggcgctgctggcccatccggggctgcaggtggtgcataactgtacgcccaaccatctacatgcccagattaatcggcagatcctcgccgccgggctgcacgtcttctccgaaaaaccgctgtgtatgacggcgggggaggcgcgggagctggtggcgcttgccgcccgggccggcgtggtgcatggcgtcagcttcgtctatcgccagttcgctatggtccagcaggcggcggcgatgatccgccatggcgaggtcggcagaatcttcgcggcccacggcagctatctgcaggactggatgctgctggagaccgactacaactggcgggtcgattcggcgcagggcggcgcgtcgcggacggtggccgacatcggctcccactggtgcgataccgtgcagtttatgaccggtcggcggattgtcgaggtgatggcggatctgtctatcgtctggccaacgcgtaaagcgccggtcaatggcaaagcgaccttcagcgccgttcacgaggcgcaggcatatgaaacgcggcctgtcgataccgaggactttggctcggtgctgttgcgttttgacgatggcagcaaaggcagctttatggtctctcaggtgagcgccgggcggaaaaaccgtctggcggtggagattaacggcagcctctgttctctggcctgggatcaggaagtgccccagcggctgtggatcggccaccgcgagcagccggatcgcctgctcagcgatgacccgagcctgctgcggccggaaatcgctgacagcgcccattaccccggcggccatattgagggctggccggacgcctttaaaaatatgatggggcatttttatcaggcggtgcgcgccgggaagatgccggcggccggggtccggcgcttcgccgctttcgacgacggcgccgatgtgatgtacatcatcgaggcgatcgtcaaaagccatcaggaacagcgctgggtcagcgtcgaacgctgagcgcaggcggggcgcaggattatttcaccccaagatagccgtcgagataggcaccggagagctcgttgccgaacaggacggcatctttattttccatcgcattatcccatttgtcgctggcattgccggtgaaggcgtgctcggtgcgggtgccctgcgccgcctgctgtttgatggcttccgcggtgcggcgggcatcactttcgctcatgccagcggctttatcctgctgtccgcgggcatacatcgccgtaaaggtcggcaggtttaaacggtaattttcctggcggttgacggtgaagttgccgccgacaaaatcggagcggtgggcgacgaaggcgtaggcatggcgttccggtgacgattttgacgaggtgcagccggtgatcgttgccagggcacagctgagggcgagaaccgcggtggagagcctcatggggatatcatccttaatcataaaagaaaaaatggggcgcaggcggtctgttgcgcctcctgcgctaatgagaatatgaaacggcaaaaggatgcgcgttaacggggcgggagagaagccctgattattaatagtttcccgggacaccgtctcgctgagctacgctttcgcgccaggctggcaggccaatcagaggtcatttatgatagcctgcaggatccacctctatcgcaggaagtgcagggtttatgtctattcagaaaattgctcgtctggccggcgtctcggtggccacggtgtcgcgggtgctgaacaacagcgatacggtaaaagccaaaaaccgtgagcgcgtactgcaggcgatcaaagagagcaactatcagccgaacctgctggcgcgtcagctgcgaaccgcccgcagcaatatgatcctggtgatggtctccaatatcgctaaccccttttgcgccgaggtggtgaaggggatagaagaagaggcggagaagaatggctatcgcattctgctgtgtaactccgggtcggatctggcccgctcgacctcgggcctgcagctgctctccggcaaaatggtcgacggcattattaccatgaacgcgctctccagcctgccggaactgaccaccatgattggcgacgcgccctgggtgcagtgcgcggagtatgccgacaccggcagcatctcctgcgtcgggattaacgacgttgaggcggctcagggggcggtatcccggttggccgatagcggccgccgacgcatcgcgctcattaatcacgacctcagctatcgctatgcccgtctgcgcgagcgcggctataaaagcgtgctgcacgtgcacggtctggcgtatcagcaggtgacctacgcgcaggatcttagcgcggcggccggtaaacgggcgatggagcaactgctgtcgcaagacgagaagcccgatgcggtgtttgccgtttcggactccctcgccgccggggcgctgcgggctatcgcccaggccggactgcgggtgccggaggatatcgcggtgatcggcttcgatggcaccgagctggcggaagtggtctccccgcagctgaccaccgtcgaacagccctcccgggcgatcggccgtacggcggtgtctctactgatgaaacgcatcgacgatcccgacgctgccgtcgagcgggtgatgatggactggcgcgtgatagaccgcgccagcgtctgaggatcagcgggagaaggcgccggtcagcgcgcgaatatcgttgccggtgggcgtttgatgaatgcgtaagccaaactcatccaccacggcgaagacatggtcgaaaatatccgcctggatcccctcatattccgcccataccacggtgttggtgaagcagtagatctcgatcggcaagccgttggcatccggcgccagctggcgcaccatcagggtcatatcctggcggatgcgcggatgatggcgtaaatactcctgcagataggcgcggaaggtgccgacgttggtcatccgccgctcattgaggatcgattgctccccggcgtactgctggttccaggcgcttatctcttcgtggcgtgaatccatatagggtttaagtaacttcgcccggatcaggcgctgctgctcctgttcatcgaggaaatgaatgctggtggtgtcgatgttaaggctgcgtttgatgcggcggccgccggaggccgacatgccgctccagtttttaaacgagtcagagaccagcgaccaggtcggaatggtggtgatggtattatcccagttgcgcaccttgaccgtggtgaggccgatatcgatcaccgcgccgtcggcgccgtactttggcatctccagccagtcgccaagcttgagcatatcgttggccgagagctgaataccggccaccagaccgaggatcggatctttaaacaccagcatcagcaccgcggccatcgcgccgagcccgctaatcaggatcgctggcgactggcctatcagtagcgaaataatcagaatgccgataataatcgccgtcaccagcttaattccctggaatatgcccttcagcggcaactgtgaggcggcgggaaatttctgcgccagttttaaaatgacatccagcagcgagaagaaggacagcatggcatatatcatcacccacagctgggccacggtggttaatatttccgcggcctcgctgcctttttgcagccacagcaccgcctggacgttgacgatgatcccctgcagggtaaaggccagtcggtgaaagagtttattctgcgtgatgatttgcagccacagatggctgctggccagcgcccgtttttcaaatgcgcgcaggaccactttgtgcaatatcagatgcacgaccacggcggtgaacaagataatgccgaagataatcatcagcgagcgggtgggggttatttcgattcctaaggcggcaatttgcgatattaattcctgcataacgtctcctgaatatccagcgggtatgatgaccgctggatagctattatgcaaattaccgccgccggtattacgaggccaccgtcgccggctgtcggttgagatgatggcgcagccacagcgctatcgcccccagcaacagcatcatggccacctcgaccagcagaaaatcaatcagcgcctgcggatagtttccgccgccgcgacgggccagcgccaggaacagcgaaccaaggatagccggtccgagaccgagggtcgcctgctgcagggtgctgaggattgcgctcccggccccggcgtcgctggcgctgatatcgcgcatgccaatccgataaaagctgttgacgatcagcgcctggccatagccgatcagcgccgtggcggggaccagcgtcagggcgttggtggcgacgccgaagcgggagaaggtggcgcacagcagcaggagaccggcgatctgcaccgtcagaccggtcagcaggatccgccccattctgtagcgggcgataagccgcggggcatacagcgccgaaataaaataggccacgccgagggcgataaagctattgccggactgccacggcgccatccccagcccctcctgcatggtcagcgccatgcagaacataaagccggaccaggcgctgaaaaacagcagggcgatggccatcccgaagcggatgctggtcaactgcagcagacgcggcggcagcagaggatggtcgccacgctgctgctggcgcagggcgctctgacgcatggcgaacagcagcggcaggaccgccaccagcatcagctgcagccacagcggccagtgcagctccggaccgagggccatcgggaacagcaggcagcagaggatcagcgcgaggtacagcgtgccctgccagtcaatccgcgacggcgtctcgcgacgggtttccggcacatagcggcggctcagagccagcaccagcaggcagatcggcacattgataaaaaaggcgttgcgccagcccagcccggcgatgtccgccgacaccagccagccgccgcccatctgaccgacgataaaggcgatcccgccgatcccgccatacaggctgatggcccgggcgtgggcggggcctttgagggtgacgtgcagggtcgcgaggatctgcggcacaatcagcgccgccccggcgccctgcagggtgcgggccgccagcagggcgccgatgctgttcgccatcccgcacagcagggaagcgatgccaaagagggcgacgccccacataaacaggcgccggcggccatagttatcgccaagcttactgcccatcgccaggcagacggcaaaggcgacgccgtacagcgcgacgataagctccagctgcgtggcgctggccgccagggtgtgggtgatggcgtccagcgccacattggtgatcgaggtatcaataagcggcagcatctggccgctcagcagcagcaacagaccggcgcggccgggtgaaacagcagacgtattcatgggattctccattgcgtcattcagcagaccgacgtagcattaccgataaattaaacgggtaccagttcctgtctatactggtattggcactactatgctggaggggtgatgaccacgatgccgcaacgggagtcgacgatcgccgtgccggacgatcgacgcaaacagctgggggcctttctgcgcgcccgccgtgaaagcctcgatccgcagcgcctggggttgccccgggtgggccgccggcgcacgccgggtctgcgccgggaagaggtggcgatgctcgccgacgtcggcgttacctggtacacctggctggagcaggggcgggaggtgaatccgtcggaggcggtgctggtgggggtggcgaatgccctgcagtgcagtccgctggagacccggcatctgttcgtgctcgccgggctgaccccgccggaagccacccaggtgacggtgtgcgaaggcatcagcccagggacccgccggatgctggacagcctgatgccgcagccggccagcattcagaaaccgaactttgatattgtggcgtggaacgacagcttctgccgcctgatgggcatcgatttcgccaccctcccggaagaagatcgcaactgcatttatctctatctgacccatgagacctggcgcagccggatcgaaaatcgcgatgtgctgccgaccttcgtctcctatttccgcgccgcgatggccgagcaccgcggcgatccggcgtgggaaaacaaactggcgcgctttttcgccgcctcgtcggagtttgaagcgctgtggcatcagcgctacgaggtgcgcggcgtggaaaaccagattaaacattttaaccacccgcagctcgggcgattcagcctgcagcagatgtactggtattcggcgccgcgcaacggctcgcgcctgctggtctacctgccgatggacgaggcgggcgagcaggcgctggcgtggctggaccaacattaatcacagggaatcagatggctggcaatgtgccatcttcgggtattgcccggtcggcgctgctggacggttccctctccctccgggagtaggggggaaggcaaagccctgccgggaagtcttttatgttatctgtggcttcagcgcacattgcgctcccggttagtcttctgcgttatgtctcttacggcgcagggagcgcacagggggcggccagtcgccgccgccccctgtacccccgggctccggccagcaacatcgccgctgcgtggtgccttcgacttatccctgcaggcttcgggtcgggccgaggcagcgtccgtgcaaaacacggccctcagcccgcatccatgcgggctgccccggccttccgggaacgtctcagcgatgttgaggccgcaacagcggcagtttcagtcgcactagtgggtaagttaacggctggctgctgcggaccgtaggccgggtaaggcgccagccgccacccggcaataaagcggctccgtgcctgatatcatgctcggcggcgctgcgcttacgcgggcttacggtaaggagtaacaatctgatatataaatggttaagtaggccggggagggcgacagccgctgcccggcagaaaggcgagcatattagcgaaaacaggtttgtcatcagtcccaaggaatgcctatgaacgtaacccgaaaagagcagcgcattattcagcgcgcgctgaatgcctggcaggccagcggggagttaatcccctcggacagccagcggctggcgcaaacgatgcgcgtctcccccttcgactggcggcgcctgagccgctatgccttctggaccgcgctggcctgcgtgctgatttccctgggcagtctgttcgccgacagcgagctggtggcgtggctgctgagcctgttcagccactcggcgctgatgcggatcctgctgcctgcgctgctggcagtcgcctgctacggctggggttttcgtcgccagcggcgggagacgcagtggcactacagcaccgaggcgattttgtttctgggcgtcgtctttaccgccgtggcgctatggcagcttggcgaacggctggataacggcagcggccatatcgcaccgctgtttctggccggatgcgtgatttacggcgccatcggctatattgcccgctccgggctggtgtggctcttttttctgctggcgctgggcaactggttcggcgcggaaaccggctacgtctcggggtggggcgcctactggctgggcatgaactacccgattcgcttcgtcctgttcggcggcgcgctgctggcgctctgctacggcgcgcaatccctgcttcgccagcggcagctgtttaccgtcagcaaggcgatgggcctcacgtacctgtttattgcgctgtggatcatgtcgattttcggcaattacgacgcagacaactggtaccaggtgagccaggcgcgactcctgccgtgggggctgctgtttgccgtagcggccggcgtctgcatttttatcagcctgaaaaccgatgacggaatgctgcgcggcttcggactaaccttcctggcgatcaatctctatacccgtttctttgagtttttctggaacgggatgcacaaagtgctgtttttcctgatccttgccgtctcgctggcggtgattggccgctatgccgagcgcatctggcatgcggggaacgttaagccatgaaaaattaagcgtttttaaagaagtgtggctggcggcagcgacgtcctgcgcgaattgtcgtataagcgaattttacgcttttgacaggggagcgagatgaataaggagtcgatttttcgccaactagaacaacggatcgccgggcgagcgctgacggcggaagcgctgggcgagtttaacgctatggccatcgccgatagcttgaagcaaaaacgcagcatcatcagccatcatctgaataatctccatcgcgagcagcgggtggtcaaagtgaacggtcgcccggtgctgtttttacccgttaccgttctgcgcgatcatcaccgcctggcggttcggcacggcgaatacgcctccattcaggcgctgtgcgcggatcgtcaggatagtctggcgcagctgattggcgcgcagggcagcctgcaggaagcattgcgccagtgcaaggctgccatcagctaccctggcgcaggtctgccgctgctgctgcggggccctactggcaccgggaaaagttttctagctcgccagctctggcactacgcaatagatgaaggtattttacctgccgatgcgccttttaccgtatttaactgcgccgagtacgcgaataatccagaactactgacctcgaagttatttggtcatgcgaagggggcctttaccggcgccgataaggccgttcctggtcttatcgagaccagcaacggcggggtgttgtttatcgatgaggttcatcggctgccgcccgaaggccaggaaaagttgtttcattttatggataacggtagctggcgccggctgggggagagcgccgacgagcgcagcgccacggtgcggctaatttttgcttcaaccgaggatctggaaaaacacttcctggcgacctttattcgccgtattccggtgattgtaaaaattctgccgatcgctgaacgcggccaattcgagcggctggcgtttatccaccactttttccgccgtgaagcccagcgtttgaaccacgatctggagctggatggcgaaatcgtcagccagctaatgcgtgaaacgcttgaaggaaatgtcggtgggctggaaaatttgattcgcaatatttgcgccagcgcctggacatttggcgaacgtgatagcggtcttttacatataaaagcgggtttgctgcccgaccgattactggcggatgcgccttttacccttcagcaaaatagcgagcgggttatgatttaccgcgatggcgacgcgcagcctcttttttctggtcgtcaccatgaataccaacggctaacggaaaatatttgtagcctgtgcgaggagttggctcaggataatattagcgtgcggacctttgaaaagcttatttatcagaacgtgacgctctatcttgatgcgctgatgaatcaggagagtacggtctctctgcaggacaaacggctgcgctttattgaagatgtgggcaaagcaatcgctgtcaattatgaccttcagctaaatgtcgaattcgcttatcttaccggccgctacctcaccagcctccctctggcgccgcgcagcgttgctgagcccgtgcgtctggtgatgcagcgctggctggactcctcggcggggctggcgcaacgcatcgcggagaaactactggatgtcgtcaataataaatacgatctgctcatcgatacgcttgaccgtctggcgattaccgccattgtcagtaatgctatcgatgcgaccagcggcggaaaagtgaaagcgctgataatcgcccacggttattcgaccgccagcagcattgccggcgttgccaaccgcctgattggcgagaagatctaccaggccatggatatgccgatggaggtggcgtttaacgatgtcagtcgcgccgtggttgattatctccagcatacggacacgcgtgcgggtgtgatggtgcttattgatatgggctacaccaaggagattgccgatgcgcttttgtcggtgattaacggcccgctggtagtggtggataacgtcacgacccgcatggcgctgaacgttgccagcgagatcgcgttgggaaaaaacatcgaacaaatcgccgaagagatcgtgccgcttaatcagtcgcgttgggatgtgttctggcccgcagaaaaaaaagagcgtgtgctgctggtgacctgtattacaggtatcggtaccgcatttaaatttaaaaatctgatggagaagagcctgctcaacgattttgatattaacatcatcgcctgcgagtatacgcgcttaaaaaacagtcgtacggcggtatcgttgctccaccagtatgaagttattgcggtcgtgggtacccacgacccgcagctggccggagtgccttgggttggcattgaggaactacttggcgagcaggggcatcgacatctgagtcagctcttaagcggctatcttaatgaaaagcaaattgcgctgattaataaaaatatggttcgtgagttttcactgcataacgttgtcaactctctgacgatactgaatgctggaaaaaccatgggccatatcgaaaccattatcgctgagtggcaaaatacgcttggttttcattttaataataacttaattatcagtttatatgtgcatctcagctgtatgattgagcgtctggtaatgcgtaatgaaattagccattataaagatcttgagcaatttacccgccagcatggtgaatttattgccatggtgaatcactcgttccagcgcctgaaaatactctataacgtggcgctaccggtagcggaaattggctatattcacgatatttttgaattacgtattgaagattttagctggtaatcctcaacgcagccccggagaattacgccggggctggcaggcggttagcgaatcaatattcgactttccacatatagcggcgggtggtcagcgggtggttgcgagcggtggccagcgccaggttgtaaacatccagtacgcagttgtgcagcaggccgcagaaatattcgcgcacgctggcgtgcagtgcgtcgattcccaccttttccacgtcaataatctgcagttttccctggtaacgttcgataaagcggatcgcgcgatcatccagcgggcgggtgcggccgctgctttttaataaaataaacggcgttcccgtttcggtaatctcaaaggggccgtggaaatactcgccgctgtggatgctggcggagttaatccactgcatctccaacagaatacagatggattcctgatgcgcggcgccgaatgaggggccgctgcccatcatgtagatgaccttttcggtcttccaggcttcggcaaaatggcgcgcatccgcctgaacctgctgctgagcgccgcgtaccacggattcaaaactggcaaaggcgctgaccatctcatcgtaatgggcgtatccctcagtttgcgcaagcacttccagcgccagccacaggctgtatgccgctttttgctgcgtcggatcgacggtttcgggatagcgcgcccagcagtattcaatagtgtaatcgctgtgttcgcacagcggcgtgccgggggtatataccagtccaatagtggcggcgcctttctgacgcgcgatgcgggcggcttccaccgtttcagcggtgttgccctgctgcgaggcgaggatcactacgctgtttttacctaacgcgttcggcgtcgcatggacaaattcattactggtaacatagccgacggccagctttttagcttcacaatcgagaaaatatttccccggccagaaaccggttaatgaaccaccgcagccaacaaaccatacgcgctcaatgtgctgcttagataaaatatcgcgaataatagtatgtgcgttttgatgagctatagacatattggtctccttgggatgtaacgggtcctccgctgaaacgcggataacttttactatgcgtcaattaattgagttgtttacttttcattttctggtggaaatgcggatccttcggtattgcgggatcgatgcccttcactggcggcagtcgggcacaaaccatttgtaacggaataatatattcaaagaccgcaaagtcgggatcgttaataaatgcgaagggcatatttttgccgttattttcgacttgtggaccaatgcgataaatatgctgagtccagccgccaagtatttccgccaggcgatcctgacgctcatcgggaaacggatcgagcatgatcagggtagagcgctcgtcgaaggcgttatagatcccgtggatgaactcctcaaattcgtaaccggcaaccggacagcgtagcgtttcaagcatctttagcgcaccttcctgaacggtgccaaacagccttgccggaccggtcaggcgaatgtccgcgctgtcgataagcggtcgggcatgattgagaacccacgcctgcgaggcctcaatgagcgtaggcaaatgattaaacgtggtatccatgcggacgagtagcgccttgcgctcctcatcgctcaggcgccgctggcgactggcgacagcaagccccagcagcatcagattaagtatggtgcagtgataccctttggttttggcgccagcccgctcttctccacagggtactgttaagaccaaatctgccgcccggtcgataacggctggcgcttccccggccatggaagcggtaagatgcccggctgcccgggcgcgttccattgcggcgagggtagagaggctgccgcctccctgagaaatgccgatgaccagcgctttgtcgctgagggtcagcgccgaatcatccagcagaaaaggccagtagacatcaacgggtagcccgcaccactgctgcataaacgagcgggcggtcagcgcgccgtgataagaggtaccggagccggtcaggataatacgcgtgacgccgcgctccgttagcgcttttgccgcctgccatagatcttcccgcgtctgcgtcagcatagcgagcagacaggcgggtgtttcattcatatagtcttctacgtgcatgggtgatattcctcttcttaaagcaggcctagcgcgctggccgccatgccaaacgcgacggttcctagcaggatccagttaatattgactcccttgcggatcaacttgtacatcccaagggtgaaaagcagcggcagcagcgaaggaagtattttgtcaataaactcctgcgccttcatggtggtctgcccggcggtaaagctgagcggggtggtgatatctatcatgctggcggtcatcgcgccgacgaccatgaggccaacaattgatgcgatataggtcacccggtccataaggccgctttggtaaattctcatcagccaggtcgtacccgcccggtagccgagcttcaggccataccagcggcacaaaagatgcggcaggttataaactaacagcgccagtatcggtcccagcaggctgccctgctgggcgaaatagatacccatcccggcggcgataacctttaatgatccccagaatatggagtcgccgatgcccgccagcggccccatcaggctggttttaatcgcgtttatcgactcctcattaaattcggggttacgctggttctcttcttccatggcaatcgacaggccgaagataaaggtcgagagatggggcgtggtgttaaacagcaccagatgacgctgcagggcgcgccccagctccgttgggtcctgatagatgcgcttcagggctggcgacattgcgaaggcatagcccatatgctgctggcgctcgtagttccaggagccctgtagcgtaaaggagcgccagaacacgctgcgtaaatcgcgggcggtgatgcggcttgcatcatcgctttgcggctgggtagcgccagtcacagtttgcgtcatttcgctcatgattagctctcctgctgcttaagattaaggaactggctgatgataaatgccaacaccacagcgaacagcgcgatggcgatgatatccagtttggtatatgccgctatcagaaatcccagaccgaggtacggcatcagtttgctgctgagcatcatgctgatcagcagggcgaagccgagcgctggcaggatcttactggcgacgatcaatccattggttatcaccggcggaatggcctccaggaaccagcttaccgccgaagaaccaagcagaatggcaaaaaataccggtagaaatccgtttaaaaaatagagtagcgtcggaccggcgaggtgcatcaggccgatcattcgggtattaccctgtgccgcatagcggtccgccagatgaccaaagcgggcgttcaccacgcgcaccaggattcccagcgtctgcgccagcattgagacagggatggcgatggtgagcgcagcctctggaccacgaccggacatgatcgaaaacgcggtggccaatacggaaccggtcacgatatctggcgggtgcgcggcgccgatggcgacgttgccgaggaaaataagctccagcgtagcgccaatcagaatcccctcatgtaaattaccgcagaccagaccggtgagggcgcacatcaccagcggtcgatcgatcattgataccccaagcaggcgaccatcaagtatccccagggcagcgatcagtccgagtaacgttgcggtgagcaacatagtgacctccgaagttaaagttggtcgttaaggagttcagccgagtgggcgggtacctgacgcatctccagccgaatacctttttcttttagcactctgctatgggcgatttcctcttcggtcagatagatggccttgccgaattgtcttgccccttccttctgtggcagaccgccgtaattaattgcgctaattcctgggactttttccactagcgcgagggtttccgcagtattgcccaggaccaccatgacttttttatgatccaacttgccgctgttaagcttttccgccgcctgttcaacggtggcgatgtccagcgtgacgcccgctggctttgccaggttaagcgacatcgtaatgaaggcatccgccgcggctttggcgttggcgacgatgatatggtcgatatccagcgctcgggtccaggcaaaaaccacctggccgtgcagcagccgataatcaatgcgcacgagtttaatcatgagattctccctgtgggtcagaggatggttgtgttattagaggattgatgaaaacaatggattcacgcgccgcgctggtggcgtagataatcgcggcctcggtagtggcttcttcgcacagcagaaactccagcagcagagtcagattgatgccggcgaccacgaaaacgttgcgatgtcgcatcaagacgctcacggcgctattgttgatactgccgccaagcaggtcggtgaagatcaccacttcatcaccattcgcctggacgatgagatgctccagggtttgctccagctgttcggtggtcacgatatcttcgtcataggcgcagaccgggataacgccgtgttcgtcgccaatcagcagcgacaaactgttcaccagtccgcgagcaaaatggccgtggctggccacatagatatgtttcacccggtttctccttcatccagatagcggtatctgttaagagcaaagggcgtgccagaaataaaaaatattatttatcaattaattaaatcgtctggttcacactaaagtcgttattcctggcacaagcgggcttatgagcgccagaaacttggcacaaacggcagaaaaagaggggggaaagagtggatgaaaaaagtcccgggcgagacgctgctgcgccatggcccgggcgttcccggcagaagggaattaaatctcggtaatggtcgtcgactgcggcagacgcgacttcggcagggtagcgttgaaatcttctacgctatggtggccgaccgggactaccaccaggctggtgtagccctgggctttcaggtcaaattcctcatcgaggatcgcaaaatcgaccccttcaatcggcacggcgtcgagacccatcgccgctacgcccagcaggaaattgccgacgttgagatacacctgtttcgccatccactgatcgtcatctttcagctctttgcggtgcatatcggcaaagaaggtgcgacccttgtggttagcggcttttgcgtccggggtggcgaaacggccatcggcctcttcctgatccaccacgcgctgcagccaggcgtcgtccatcgcggttttcgcgcagaacaccaccacgtgcgaggcgtcgagaattttacgttcgttgaacacgtaggtgccgctggcggctttcgccacgcgagctttcccttcatcggtgctggcgacaataaagtgccacggctgggagttggtgctagacgggctgtactgcagcagcgttttcagctgttccgcttccccggcagtcagctttttcgtggcgtcaaaggccttggtggaatagcgcttcaaagcgaccgatacgatatccataactcttcctcacagtttacagcaccttaccggtgcgttcaggagaggaagagtacagcgaagatcgcaaaatgataagggtgaaaaatgcgataacacttatcgcatttggctgaaaatcagcgcggacgcaggcgctgctgcgcctttttactcagcttgttcaccacctgatgccacgaatcgtcaatcagctcggccagcagatcctcgctgatatcctctcctggcaccaccgtgatccagtgtttcttgttcatatggtagccgggttcgatactgcgataaatttgctgattcagcagcgacttctgcggctcggccttgagattaaccagcgcccgcccgcgaatagtcatggtgatcataaagatgcggccgtcgaccttaaacacgtcgtactctggcccaaagggccagcagtgttcggtaaacgggtagctcagggcgatacggtgagcgcagggatgcagtgtttccggcgtcattaggcgtccgcctcatgcagggcgtgccacatggcttcaaagccgagggcgataatctcccgggcgcgctgcggatcgtggctggcgaattcgatggtggtttccgccagcgacagaaacagggcgtcgccaaaggcgcggtacgcctcgctgaggaatatctctttcaccgacagctggcacatttcgttgagctccggaaagctctcttttacctggcggcgggtttcgtcggtgatgcgctcgctgagcgccatccggcggatcgctttgtgctccatcgggttgcgcacgccccagtcgatatagctgttccagatattgcgcgcgttctctttcgggcgcttctcgtccggatccagcccggcgatcattgtgcgcaccaggcgcagcttaatcgcgaggtacagctcgttgagcaactcatccttggtggcgaaatagcgaaacagcgttccctcggccacaccggcgctgcgggcgatggccgacgtcgaggcggctatgccggactgggcgaaagccgcggtggcagcttccagtaacgcttgctttttatcttcactctttggacgagccactacttttttcctcacgcaggtttaaacaaaccgccgatcttggcacgtctgaccaggtcgctgcaacggcggaacgcaaaaattgaaaatcgtcttgacgactttcatcgctttcctaataatgagtgcgtactcactcataatcaagttatatcataaagcctccgggatgggggcttttgtctggtcaggatatgaaccgtgtcactttcagcgtggtcgccatcatgttactcgcagcagcaacgacattgccgtttgttcttaatgccggttttggtaaggcgccgcagggagcacagcttagccaggtggaagcgtctccccactaccgggacggccagttccataaccaattgcccacgccagggttcaccgggcagaaaaatatgctggcggcgtggtgggatttcctgatgaccaaacgggaaaacgcccgtcccgcgcaaccgctgccgctggtgaagaccgatctggcgacgctgcccctcgggcaggacgtgatggtctggctcggccactcctcctggtacctgcagctggcgggaaaacgcatcctgatcgacccggtgttcagcgattacgcggcgccgttctcctttatcaataaagccttccccggcgactatccgtggcgggcggaagggatgccggagatcgatctgctgatcatctcccacgatcactacgaccatctggattacgccaccattcgcgccttactgccgaaaattaagcgggtcattacgccgctgggggtcggatcgcatctgcgctactggggaatggacggggcgctgattaccgaagcggactggcagcaggcggtaccggccagcgacgagctcaccgtccacgtgctgccggcgcggcacttttccggccgcgggctgaagcgtaaccagacgctgtgggccagttttctgttcgttacccggcagcaaaagatttattacagcggcgacagcgggtatgggccgcactttaaagcgataggcgatgagttcggtccggtcgatctggcgatcatggagaacgggcagtatgaccaggactggaaatatatccacatgatgccggatgaaacggctcaggctgccgacgatctgcgcgctcgcgcggtgctgcctgggcatgcaggacgattcgttttggcgaaacacagctgggatgaaccgtatcaacggctggcggctgccagcgaaggaagggcctggcgtctgctgacgcctgtgcagggcgagccggtgtgggtcgccgataagacgcaatcatttaacgcctggtggcgctaagcgccagtgcagtatcagaggagagagcatatgacgatttccgctcaggtgattgatactatcgtcgagtggattgatgataacctgcatcaaccgctgcgtattgatgatatcgctcgccatgccgggtattcgaaatggcatctgcaacggctgtttttacagtacaaaggggagagcctggggcgctatattcgcgaaaggaagctgctgctggccgcccgcgatttgcgcgacaccgatcagcgggtctacgatatctgcctgaagtatggcttcgattcgcaacagacctttacccgcgtcttcacccggaccttcaatcagccgccgggcgcctaccgcaaagagaaccacagtcgcgcccactgaggcgcgcctctcctggtttaccgctcgagggaaaaccagcgacgccacacccagcgcagcaccagatactcaatggcgcccagcgctaagaaccacagacaaaacagcaccgtatagagctggttgagatccatcatatggaatgtctcaaccagcttttgcgccagcgtcaggcccagcgaaggcgcgggcaacagcagacaggagagcagggccagcagtaagatcccggcggcggagagcagcgtttccagtggatgtttcatgtcatgttaatcatcagttaaaaaaacatattgtccggtaaaataatgcttaacgcaatatgctttgtttttttactcgctataacacgactattttaaatattatcgcctgcctttcgctctcatgttaattaatctgaaataatttgtaattaagttaattgcagccgggtgtaaattaacgtcattattatgccagcgcttttacaaaactgtaagtgctatatcccaccagcgtagcaatgataatggctagcgcgatgtacagcgccagtcggcgcccgcggtagattccaaacatattttacctcgtttagttttggtttattaatattctgtaatagttggtttgtggaattaacttatcacaaaatttttattttgcgaaaaatttagacttgtattggttcacatttttatcggcatttttgccctcttttacttcattggccaggaatgatttcaggctttccgactcacggaatttataaggaaaatgtaaattgaccaagatgaataacccaaagtttacgacgccctcgggcgacaccgcgccacggcaggtctggcagcagaccgttgacgcagtgctggcgcagaccaaaagccaggccgctgggttaagttccgcagacgccgccgagcgcctgaatacctgtgggccgaacgcgctgccggaaaagaaaggcaaaccgggctggctgcgctttctcgcccactttaacgacgtactgatttacgtgctgctggccgccgcggcgctgaccgccatcatggggcactgggtcgataccttggtgatcctcggcgtgacggtgattaacgccctgatcggtcatatccaggagagcaacgccgaaaaatcgctgcaggggatccgcaacatgctctccagcgatgcccgcgtccagcgtaacggcaagcatgagactatcccgacgcgcgacctggttccgggggatatcgttatcctgcgcgccggcgaccgcgtgccggcggatatgcgcctgattgaaacccacaacctgcgggtggaagaggcgatcctcaccggcgagtcgacggtggtggataaaatcaccgacgcgctggagggcgatctgccgctgggcgaccgggtgaacatggtcttttccgggaccaccgtcagcgccggcggcggcgtcggcgtggtgaccgccaccggcgcgcagaccgaactcggccatatcaaccagatgatggcgggtattgagaagcaccgtaccccgctgctggtgcagatggataagctcggcaaagcgattttcgccattattctcgccatgatggtggcgctgtttatcttcagcctcgcgctgcgggatatcccgatgggcgagctgctgctgtcgctgattagcctggcggtagccgcggtaccggaaggactgccggcgatcatctcgattattctgtcgctcggcgtgcagacgatggcgcgcaagcgggcgattattcgtaagctgccgaccgtggaaaccctcggcgccatgaccgtggtctgctcggataaaaccggcaccctgacgatgaacgaaatgaccgtcaaagcgatcatcaccgccgactgctgctatcgggtggaaggcgacagctacgagccgcaggggcggatcttcctcgaggggagcgatgagcccgtgcaggttcagcccggcaccgtgctggagacctggctgcgcaccatcgacctgtgtaacgacagccagcttacccaggatgagcgcggtctgtgggggatcaccggcgggccgaccgaaggggcgcttaaagtgctggcggcgaaagcgcagctcccggcggtggaggcccgtctggtggccaagatcccctttgactcgcagtacaaatatatgtcgaccctgcagcacatcgatggcgatgcccgggtgctgatcaccggtgcgccggacgttatcttcgccatgtgccgcgagcagatgagccgccacggcgcggtgccgttcgaggcgcagtactgggaagaggagatggcgcgcttcgcccgtcagggactgcggatggtggcggcggcctgtaagccggccagccttgatgccaccaccctcaaccatgaggacctgcaggagggactgattttcctcggcatcgccgggatgatggatcccccgcgtccggaagccattgacgccatccacgcctgccagaccgccggcatccgcgtgaaaatgatcaccggcgaccacccgcagacggcgatgagcatcggccagatgctggggatcaccaacagcagccaggccatgaccggctaccagctggagcacatggacgatgcggcgctggcgaaggcggcggtggagtacgacatctttgcccgtaccagcccggagcataagctgcgcctggttaaagccctgcaggataacggcgaagtggtcggcatgaccggcgacggcgttaacgacgcgccggcgctgcgccaggccgacgtgggtatcgccatgggtatcaaaggcaccgaagtcaccaaagaggcggccgacatggtgttgaccgatgataacttcgccaccatcgccagctcggtaaaagagggccgtcgggtctatgacaacctgaagaagaccatcctcttcatcatgccgaccaacctggcgcaggggctgctgatcatcatcgccctgctggcggggaacattattccgctgaccccggtgctgatcctgtggatgaacatggcgacgtcggcgacgctctccttcggcctggcctttgaggccgcagagcgcaacgtgatgaaccgtccgccgcgtaaaaccggccagcatgtgatggatggtttcgccgtgtggcgagtggctttcgtcgggtcgatgatcgcgattgccgcctttatccttgaggcctggctggcgccgcgcggccacagtccggagtttatccgcaccgtgctgctgcagatgctggtgacggcgcagtgggtctacatgatcaactgccgcagcagcgacagcttctccctgagcatgggtctgctgcgcaacaaaggcatctggctggtgaccggcgtcctgctgctgatgcagctggtcattatctatgtcccgctgatgcagagcatgtttggtacggaagcgctgccgctgcgctactggtttgtcactctggtcatcggcgtcgccatgttcctggtggtggaagtcgagaagcgtctgacgcgccggttccgcaaaacggcctgaacaatctcgcgcgcctcgctgcaggcgcgcgttactgtcgcaaggatcctctatgattaaaaccttccgctttgctctgctggcctgcggtctggtcggcggcgccctgacggcgaccgccgcgccggcggtgccggtccgcgtcgccacggttgaactggctcctcatgctgaagaacgcgctatccccgggcgggtcgaggcgatccgcgccgtcgacattcgcgcgcgcgccgaaggggtgattgttcagcgccacttccaggacgggcagtatgttaccgaaggcgacctgctgtttaccctcgacgacgcgcagccccgcgcggcgctggctctggcgcaggccgagctgaaaagcgccgaagcctcattacgtcagtcgcagcagttgctcactcgctacgagcggcttatcaacaatcactccatcagccgcaacgacgtcgatacggcccggatgcagcgcgacgtcgccgccgctgccgtacagcaggccaaagcccgcgtcgaggcccagcagattgtgctcagctacactcagattgcggcgccggtgaccggtcgcgtgggccatagcgcctttcacgtcgggacgctggtcaattcgtccagcggcgtgctggtggacattgtgcagttggatccggtgcgggtctcgttcgccctcgacgaagccgcgtttttcagcaaaaccggccagcacgccgatatccacgctctgaagcaggcgtggctggcgcagattgaggttgatggtaaacggcgcgacggggtgttgacctctatcgataaccggatcgacgcccgcaccggcagcgtagcggtgcgggccgagtttgccaatccgcagcaccgtctgctgccgggcggcagcgtgacgatcctgttccgtccgcaggaactgccgtcgcgagtgatggtcccggccgccgccgtgcagcaggatccgcagggctttttcagctgggtgctgaagccggaccacaccgccgggcagcgtcgtctgaccctcgcggggcagcaggggcagcagtttgcggtcgagaaagggctgcaggcgggcgagcaggtgatcaccgacggcgcgcagcggttgcgcgaaggcgccgcggtgcaggtgctgaactagctaaggagaagggatgctgaccttttttatccgtcgtccgcgatttgccatggtgatcgcgctgctgctgacctttgtcggcgcggtgtcgctgaagctgatcccggtggagcagtacccggcgatcacccccccggtggtgaacgtcagcgccagctggccgggcgccagcgcgtcagacgtggcggaagccatcgccgccccgctggagacccagctcaacggcgtcgatcatatgctgtatatggagtccaccagctcggatgaggggacgtaccgcctgagcataaccttcgcggcgggcaccgatgccgacctggcggcgatcgacgtgcaaaaccgggtggcgcaggcgctggcgcagctcccggcggaggtgcagcagaatggcgtccaggtgcgcaagcgcgccagcaatctgcttatgggggtaagcctctactcgccgctgggcacgctgtcgccgctgtttgtcagcaactacgccagcacccaggtgcgcgaggcgctggcccgcctgcccggcgtcggcgaggtccagatgtttggcgcccgggattacagcatgcgtatctggctgcgcccggaccgcatgaacgcgctcaacatcaccacggatgatgtcgcccaggcgctgcgcgagcaaaatgtacagggcgcggcggggcaggtgggcaccccgccggtatttaacggccagcagcagacgctgaccatcaacgggctggggcgtctgaacgaggcggccagctttggcgagattatcctccgccgcggcgcgcaggggcagctggtgcgcctcgccgacgtggcgaccattgagctgggcgcccgcagctacagctccggcgcccagctgaacggtaaagcgtcggcctatctggggatctatccgacgcccaccgccaacgccctgcaggtcgccagcgcagtgcgtgcggagcttaaccgcctgcacactcgctttccggcggatctcacctgggaggtgaagttcgataccacccgctttgtggcggcgacgatcaaagagatcggcgtctcgctggcgctgaccctgctggcggtggtcgtggtggtgtcgctatttttgcagagctggcgggcgacgctgatcgtagtgctggcgatcccggtgtcactgatcggcacctttgcggtgctctatctgctgggctacagcgccaacaccctcagcctgttcgcgatcattctcgccctgacgatggtggtggatgacgccattgtggtggtggagaatgtggaaaccaaaatggcggaagggctggatcgcctgcaggccaccgcccaggcgctgcggcagatcgccgggccggtgatcgccacgaccctggtgctgctggcggtgtttgtgccggtggcgctgctcccggggatcgtcggcgagctgtaccggcagtttgccgtaacgctctccaccgcggtggccctgtcgagcctggtggcgctaaccctgacgccggccctctgcgcgctgctgctgcgcccgcgtcctgcccggccagcggcggtgtggcgggcgtttaaccgtcttctcgacggcacccgcgacggctatggccggctggtaggctggatgaaccgccgtccctggctggcgctggcggcgacggtggcggcaggcgcgctggtggcgttcagcttcacctcgatgccgaaaggcttcctgccgcaggaagatcagggttacctgtttgccagcgtgcagctgccggaggcggcgtcgctggagcgtaccgaagcggtgatgacccaggcgcgcaagctgctgatggctaacccggcggtggaggatgtgattcaggtgtccgggttcaacattctcaacggcaccagcgcctctaacggcgggtttatctcggtaatgctcaaggactggcatcagcggccgccgctggatgcggtgatggcggatattcagcgccagctgctgtcgctaccggaggcgacgatcatgaccttcgcaccgccgaccctgccgggcctgggcaatgcctcggggtttgatctgcgcatcctggcgcaggccggtcagtcgtcggcggagctggagcaggtgacgcgggagatcctccagctggcgaaccagcattcgcagctgagccgggtgtttaccacctggagcagcaacgtgccgcagctgaccctgacggttgaccgcgaccgggcggcgctgctggatgtgccggtggcgcagatcttcagcagcctgcagacggcgttcggcggcacgcgcgccggcgatttcagccgtaacaatcgtgtctatcatgtggtgatgcaaaatgagatgcagtggcgcgagcgggctgagcagattagcgagctgtacgtccgcagccgcgacggcgagcgggtgcggctgagcaatctggtcaccattacgccgacggtgggggcgccgtttattcagcagtacaatcagttcccgtccgtgtcggtgagcggttcagcggccgagggggtcagcagccgcacggcgatggcggccatggagcagattttgcaggcccatctaccgccgggatatgactatgcctggagcgggatctcctggcaggagcagcagaccggcaatcaggcggtgtggatcgtgctggcggcggtggcgatggcgtggctgttcctggtggcgcagtatgagagctggacgctgccggcgagcgtcatgctctcggtgctgttcgccatcggcggagcgctgctctggctgtggaccgcgggctatgccaacgatgtgtatgttcagatagggctggtgctgctgatcgccctggcggcgaagaatgcgattctgatcgttgagttcgcccgcagccggcgcgaggaggggctgtcgatagtcgacgctgcgcgcgagggggctacccgccgcttccgcgcggtaatgatgaccgcggtgtcgtttattatcggcatcatgccgatgatgctcgccaccggcgccggggcgcagagccggcggatcatcggcaccacggtattcagcgggatgctggtggcgacgatggttggcatcctgtttatcccgtcgctgtatgtactgtttcaacgtatgcgcgagtgggcgcatcggcgggggtaagcgcggcgctaccggtcggtaacggggatactccaggctgcaacgactaccgggcggtcccctctccctttgggagaggggtagggtgagggtgggttttgcgttcacgttgcgtttgggcgtgagccccgccttatctgccgaccttcggttcgccgatttcagcgggaatcagccctgctgcacgcccgtagatttcaggagccacaccatagcgaacagactctgtaggcccggtaagcgcagcgtcaccgggcaaggacatcgggcacggcggcaataccttgcccggcctgtcgttaatttattcactctcctggctggaatggctgcccccaaacgcgcccgctattttctctccaccgttatcatggtcacgaacggatgatactgccacggcacgctgccgcctttgcggtacatcttcgacagggtgccgtcgagataaagcatctgccgcacgccaagctttgactgcgcatagcaggcaaaatcgtaaaagttggtctcgcgatcgctgagcataaacaccacccggccctgcttatcgataccaaccccgttgcgcagcttgcgcgaactggcggagggcttcagtcgccagttgatgacgccattttcaatcagcatcgggccggactgcaccgcatagcggatggcgggagagggtttgtacgccggcagcggcacgattttcgcccggccgttttccaccaggaatacgccgccggggcggataaagaagttcccgccgccggcggagcggttgaccggcgtcagccgtttgccgtcttcgatatacagccccagcggcgcgtaggccttatcgtaaatgccgccgttcatcgccatctgcacccggccgtcgccatcgatacccgccagcagcgaacgcagggaaccccaggctttgccgtgccgatcctgccagtacatcgcaatgcgctctttctgcgcatccacccgatagctctgcagggtcagcgtcgggtcggtgagggtacaggcggcgctggcgacggcggccaggggcagcagcgccagagggagcaggcaacgtaataacatgggcagtcctttctatagtctgcgccgagtatacccgcctcgctgccttatgccgcccaaatctcacagtgtttttgcaccagcccggaaagcgaaccgccgttggcgataaagtcgcgcatctgctgcgcctcgctgtgcggcgatttcgcctggcgaaccaccgcctccagcgctgccgtcgccttcagctgatgggcgaaaggggccagccggtcggcgagctgcaggatctcctggcggatgctgcgctgctctccgctgcgcacgtcggtgagggtcccgtccagcccgtagcggcaggcctgatagcggttaaaggggtacagcagataatcatcaggctggtgcttaaaagggcgctccgtcaacagccagcaggccagggtctgaataaagccggcgatgtggatcgcctgggcaagggtcaggggggtgtccatcacccgcacctcgacggtaccaaactgcgggctggggcgaatatcccagtgcagatccttcatgctgtcgatcatgctggtgtagctcagctggcggaacaggcgacgaaacccctgccagtcggccacccacggcatcggaccgttgtcgggataggaggagaagcggtttaggcgtgaacaggcgaagcggctgtcggtactgtcaaaccacggtgaggcggcgttaagggcgatgaagtgcggtacaaagcgcgataggccatgcagcagatagatggcgtcgtcaccgctctggcagccgacgtgcacatgctggccaaagaccgtcgcctgctgtgccagatagccaaaatgctcgacggttttgacatagcgcgggttatcgctgatttgctggcgctgccaggcatgaaaggggtgggaacccccgccgcagatctgcagatgatggcgcagcgccgcgcgctggaccgcctgctggatggcgctgagctggatttgcgcatggctgatgtcgcggcacaccccggtggcgatctccagcatgctctcggtgatgtcatgtttggcttctcccacggtcaactgatgctggacgtcggcaatcagcgtcgaggcatcctggctgagatcgtaacccggcgggttcaccacctgcagctccagttcgataccgagggtaaaaggatcggagcggtgaaaatcggctaaaggcatagtctctcccggtcgatgtgttccctgaagtatagaagggattgatcccgacggagaatacgcggcggcggtggacgggggatgaataaaaagtgacgcagagtgattatttgaaatttgccatatagcggctggtgcaattctgcaacatatttcccgctggcggtgcggcggaataagatgcaattattttcccataattatcatggtgataatataagtcattcttattttaccggtcggttttggcctattttcgtccgcgtaagagctggtacgcattttgcctgttaatccgtgacactttatttaacagggatcatgtgatgcacaaaaagacgttattttcgcgtgccggtcgtctcgccgtggcggtgagcggcgcactggccctggcgggcgccgccttacctgccaacgcctccacgctgcggatcgccatgaccgccgcggatattccgttaacccttggccagccggatcaaggctatgagggcaaccgctttaccggcatcccgctgtacgacgcgctggtggagtgggatctgtcgcaaggtgaaaagcccagcggtctggtgccggggctggcgaccgagtggcacatcgatccgcagaacaccagccgctggattttcaccctgcgtccgggggtgaagtttcatgatgggacggaggtgaacgccgacgccatcgtctggaacgtggataaggtgctgaataaagcggcgccgcagtacgccccgggtcagatcggcaacaccctgtcgcgcatgccgaccctcaccggcgcagagaaaattgacgaccacaccgtggcgctgaccacctcggaaccggatgcgctgctgccgtacaacatcaccaacctgtttatcgtctcgccgacggcgtggcagaagcagtatgacgcggtgccggccagcgtgagagatagcgccgcgcgcagcaaacaggcgtggaccgccttcgccgcccacgcggtgggtagcggcccgttcaaactggagaagctggtgccgcgtcagcagctgatcctcgataaaaaccccgactactggaacaaagatcgcattccccgggtggataaagtggtgctgatccccttgccggaggccaacgcccgtaccgcggcgctgttgtcgaagcaggtggactggattgaagccccggcgccggacgccatcgatcagatcaagtctcagggttttcacctctacgccaacacccagccgcatctgtggccctggcagttctcctttgaaaaaggatcgccgtggcaggacatccgcgtgcgcaaagcggccaacttgtgtctgaaccgtgccgagctgaagagctacctcggcggctacatgaccgaggccactggggtctacgaggctgacagcccgtggcatggcaaacccaccttccagataaaatatgacccggacgccgcccgccagctaatgaccgaggccggatacaatgccagcaaaccgctgcgcgtcacggtggctacctcggcctccggctccgggcagatgcagcccttgccgatgaacgagtatatccagcagagcctgaagagctgcttcttcaatgtggatatcaaagtggtggaatggaacaccctgtttaccaactggcgcctgggcgcccgggacccctcggcgaaagggatcgatgcgatcaacgtcagcgccgcggttaacgatccttactttggcctgatccgcttctcgacggccaaagcgtttccgccggtggcgaccaactggggttacttttccacgccggagacggagaagctggccgccgccgtcaagcacgcctttaccccggcggagatgaacaaagcggccggtgagttgcacgccgcgctggtggatcaggtgccattcctgtttgtcgcccacgacgtcgggccgcgtgcgatttcccctgcggtgaccggggtggtgcaaccgcagagctggtttatcgacctcagcctggtgagcaaaaaagagtaatcgcgaaaggggcgaccgatgatcaatacgctgctataccgcattctgctggctatccccaccatgctgggggtggcggtgatctgtttcatgctggtgcagatcgccccgggcgacccgctggtgtcggtgatgccgccggacgcctcggaggcgctgcgtcagacattaatgcaggcttacggctttgataagccgctgcccctgcagtttatccactggctgtggcgggcgctgcacggcgaccttggtatgtcggtcgccaccggccgcccggtgatagacgaagtgatgaccgcggtggcttactctctgcgcctggcgctgctggcgacggcgatcggttttgtcctcggcagcctgttcggctttgtcgctggctattttcgcaacagcgtcattgaccgtctggcctcggtattgtcggtgtttggcgtcagcgtgccgcactactggctggggatgctgctggtgatcctctgcagcgtcaagttcgcgctgctgccggccaccggcggcgggccgataggcgaggtgggctggcaatgggactgggcgcacctgcagttcatgctgctgccggccctcaccctgtcggtgatcccgaccgggattatcgcccgcaccgtgcgctcgcaggtggccgatatcctcagccaggagtttatcgttggcctgcgcgcccgcgggctcaacgagtcgcgcatctttgtccatgtcatgaaaaatgccgcgcccaccgcgctggcggtgatggggctgcaggtgggctatctgatgggcggctcgatccttgtggagaccgttttctcctggccgggaaccggattgctgctcaataccgccatttttcagcgcgacctgcccctgctgcagggcaccatctgggtgctggcgctgtttttcgtgctgctcaacctgctggtggatattctgcagaccaccctcgatccgcgtattaagaggagctgaccatggtggatacggcaacgacgaaagcggtcccggccgcagcggcccacgctacccggcaaggttactggcgcggcgtgctgcgccgcctactgcgcgaccccggcggggtggtggtgggcgtggtgatcctcctgctgctggccctggcgctgttcggtccgtggcttatcgtcaaagatccctatcaaacgtcgatgttcctgcgcctgaaacccatcggcagcgacggcttcccgctgggctcggatgagctgggacgcgacatgctgtcgcggctgatccttggcacccgactgtcgctgtttatgggaattgtcccggtggtgttcgccttttttatcggcggggccatcgggattatcgccggctatacgggcggcaaaaccaataccgtgattatgcgcaccgtggatgtgttctatgcctttccctccgtcctgctggcgattgcgctgtcgggagcgttgggggcgggcatcggcaatgcgctgttgtcgctgaccctcgtgtttgtcccgcaggtggcgcggattgccgagagcgtgaccgcccaggtgcggcatatggactatatcgacgccgcccgggccactggcgccagcgcgttgaccattatccgcgtccaggtgttgggcaacgtgctcgggccgatcttcgtcttctccaccgggctgatttcggtgtgcatgatcctcgcctccggcctgtcgtttctcggcctcggcgtgcggccgccggagcccgagtgggggctgatgctcaatacgctgcgcacggcaatctatacccagccgtgggtggccgccctgccgggcctgatgatttttatcacctccatttcgttcaatatcctcgcggaccgcctgcgtgcggcaatggcgattaaggagtaagcgatgcaaccctttatcaatatcgaccttggcgggccggcgcagccgctgctgaaggtcaatcacctgctgaagtactttcgcggcggcaaaggccgggaggtggtgcaggcggtggacgatatcagcttcacggtgatgaaaggcgaaaccctgggggtggtcggcgagtcgggctgcggcaaatcgaccaccgcccggctgctgatgcagttgctcacccaggacagcggcgaactgatcttcgacggacagggggtcggctcgtcacgtctgccgctgaaagcctaccgtcgccaggtgcagatggttttccaggatagctatgcttcgctcaatccgcgcctgaccatggaggagagcatcgccttcggccagcgcgtccacggcgtcagcgccagagaggccagcgaatatgccagctatctgctggcgcacgttggccttgagccggcgcgctttgccgaccgctacccgcatgcgctctccggcggccagcggcagcgggtgaatatcgcccgcgcgctggcgatgaagccgcggctggtgatcctcgatgaggctgtgtcggcgctggataaatcggtggaagcccaggtgctgcagctgctgcaggagctgaaacggactctcgagctgacctacgtgttcatcagccacgatctacacgtggttcgctggctgtcggatcggatcctcgtcatgtaccttggcgaagtggtggagattggcccggcggagcagctgtttaccgcctccgcccacccctatacccgggcgctgttaagctcgatgccctccatggacccggaaaaccgcaccctgacctcgccgctaagcggcgatcccccagccccatcgcgccgccgagcggctgccgctttcacacccgctgcccgcatgcgaaggcggtctgcgccgaggtgaaaccgcggctggaggcggtcggggaggggcaccagagcgcctgcctgatggcgcagccggcctcgccctggcatcaaagcatcccccttaaggaggtcagccatgtcggataacgcctttgtccatgtgcgcgacctgcgggtcgtctttcgccgcgacgggcagaccatcaacgcggtcaatggagtctcctttgaggtacaaaagggggaggtgatggcgctgattggcgagtcgggttccggcaagagcgtgaccctgcgggcgctgatgcgcctgcacccgccagggagcagtgagctctccggcaccctgcaggtgggggatgacgaggtgctgacgatgagcgccagccagctgcggcgctatcgcggcggacgctgcgcgatgatttttcaggagccgctgctggccttcgatccggtctacaccgtcgggcagcagattattgaagggttgcgccgccacgaagggctgtcgcgccaggcggcccgggacagggcgctggaggccctgagccaggtgcgcattcccagccccgagcggcggctggatgcttacccgcacgagatgtccggcggaatgcgccagcgggcgatgatcgcccttgcgctctcctgtaacccgaagctgctgctggcggatgagccgaccaccgccctcgacgccacggtgcaaatccagatcctgatcctgctgcgcgagcagcaaaagcagcgcgggctgtcgatcgtgtttgtgacccacgatatcggcgccgcggtggagatcgccgaccgggtggcggtgatgtacgccgggcggatcgtcgaggaagcgtcgatgagcgagatcctgcgccacccgcgccatccttatacccaggtgctgctgggcagtcggccgaaagaggggcttaagaaaggtgatgccctgcactgcattcccggcgcgccgccggatctggctcgcttgccgcccggctgcgcctttgccgagcgctgcccgcaccgtcgcccggtctgtgagcagagtctgccgccgacggaatccgtcgcggagcgccacgcggtgagttgccaccgctggcgcgagctggcgattgacgctaacgcccaggccctggccgtctgatcggcggcaaaaaaccatacaggatgaagaccaggcgttgatagcgcattcccaccgccggttacgctggcggcgaccttgatgtcaggagactaccatgagcagtgatgtactttttacccccgcgaccgacaccaccggctggcgcatcaatggcgaccgcctgtgggcgtcgttaatggatctcgcgcagatcggcgccacgccgaagggcggctgccgccgtctgaccctcaccgacctcgaccgccaggggcgggacaaggtaataggctgggcacgggaggccgggatgagcgtcaccatcgataaaataggcaatgtatttatgcgccgggaaggccgcaaccccggcctgccgcccatcgtctccggcagccatatcgacactcagcccaccggcggcaaatttgacggcaactacggcgtgctggcggcgctggaggtggtgcgcacgctcaacgatctgcagattgccaccgaggcgccgattgaggtggtgttctggaccaacgaagaggggtcgcgctttgtgccggtgatgatgggctccggggtctttgccggcgtcttcccgctggaggagacctgggccgtcacggataaagagggcatcagcgtcggcgaggcgctggcgcagatcggctatattggcgagcagaccccgggggaccatcccatcggcgcctattttgaggcgcacattgagcaggggccgattctcgaagatgaagcgaaaaccatcggtatcgtgcagggcgtgctggggatccgctggtacgactgcgtggtcaccggccaggcctcgcacgccggacccacgccgatgcgcctgcgtcaggatgccctgcaggtggcgacccgcattatgcaggaagtggtggccattgccgggcgcagcgaagagggacgcggcacggtcggtagcgtgcaggtgtggcccaacagccgcaacgtggtgcccggggaggtcaccttctccattgatatgcgcaatctcagcgatgcgctggtggacgagatggatcgccagctgcgggcgtttatcgcggaggttgagcgggagagcggtctgcaggtggccctgaagcaggtaagccactatccggcggcgccgttcgatgccgaatgccagcaggccattgccgatgccgcgcagcggctgggctatccggcgcggccgatcgtctccggcgccgggcatgacgcagtgtatatgagctacctggcgcccaccgggatgatttttatcccctgcaaggacgggatcagccataacgaaattgagtatgcctcgccggagcacgtcgccgccggcgccaacgtgctgctgcaggtgatgcttcagtacgcgcggccggtgtagacggtcgtcctccccggcgacgcgacctccagccgtttatcatgctatagcccgggtaaggcggttacgccgccgcgacccgggacggcggatgacggggcggtcaatcacggctcgggctccctgcgccaacccgctggcggccaaatttgcgcgagcccaccacgcacagcaccacgcccagcgtgaccgccagcatcaaggggctgacggtttcgtgcaacagcgccgccgacaggcctagtccgaagaacggctgcaatagctggagctggccgacggcggcgatcccgcccgcggccagccctttgtaccagaagatgaagccgatcagcatgctgaacagcgacacatagccgagcgcgacccaggaggaggccgagatggcatgccaggaggcgggctgaaccagcagcgaggcggggagcatcaacggcagggcaatcaccagcgcccagcagatcacctgccagccgccgagctcccgcgtcagcttcgccccttccgcatagccgaggccgcagacgataaccgccgccagcatcagcagatcgccgctgagtgaggccgccgcattttgcgtcagggcgaatcccaccaccagcaggctgcccagcagcgaaaagatccagaaagcccgccgcgggcgttcgccgccgcgcagtacgccaaagagggcggtcatcagcggcagcaggccaataaacacaatcgaatgcgccgaggtgatgcgctgcagggccagcgccgtgagtagcggaaagccgagcaccaccccggatgagacgatgatcagggacacaagctgcgccaggcgcgggcgtttctggcgaaagcccaccagcagcgcgatggcaagcagcccggcgatagaggcgcgcagaaaggtcaataacaacggatccatatcctgcaccgccagccgcgtcgcgggcagcgaaccgctgaaaatgatcacccccagtaaaccatgaacccatccggaccagggaccgggcgccgatttatccattgctgaatctaccacgttaacctcgcgttatctgattgggctgcgcccgcttgagcatcgtcagcggcgatggtaatgtggccaatctaatacaatcaaattattgtcatagatacatttcacgatgaaagcccgatataaagccgttgtcgaccgatatgcgcaggcgatccgcagcgggcagctgcccgccggcagccgtctgccgacgcaccgtacccttgccgccggagaacgcctctcgctggccaccgccacgcgcgtctaccgtgaactggaagagatggggttggtcagcggcgaaaccggccgcggcaccttcgtgcgcgacctctcgctgcctccggggcacggggtcgatcagcaggtggtcgccgccgatgtcgtggatcttaatttcaactacccttcgctgccggagcagggcgatgcgctgcgcgaggcgctcaggcagctggcgatggcgggcgatattgactcgcatctgcgctatcagcctcatgcagggcggctcgccgagcgggacattatcgcccgccatttgacctgccagcactttgcgccggacgcggaaaatgtcctgatcgtcaacggcgcacagcacgggctggcggtgaccgtcatggggctgttacgaccgggggatgtggtggcggtggatgcgctgacctattcgggcttcaaggttctggcggcgctgtatcatctggagctggcggcgatcccctgtcgaccggagggaccggacctgcaggcgcttcagacgctgtgccagcagcggcgggtgcgggcggtgtataccatgccgacgctgcacaatccgctgggctgggtgctcaacaccgggcagcgacaggcgctggccgatctcgcgcgccagcacgatctgctgattattgaagatgccgcctatgcccggctggtgagccatccgccgccgccggtggtcagctatgcgccggaaagaacggtgtatgtcaccggattttcaaaaaatatcgccaccggactgcgcgtgggggtggtgatttctccgccgcgctatcgcccggagattgagcgcgccatccgggccacgacgtggaatacgccgacgctgataagttcgctgatctgcgcctggattgaagatggcacggtggcgcgctttgaaacgcagaaacgccaggatgcgcgacagcgacagcaggtggcccgcgaggtactttgcgggcttcccgtcgtcagtcatcccgattcgtacttcgtctggctgccgctgggtgaagagagccgggccgatcggctggcgaatgcgctgatggaacgccgcatttcggtatcgaccgccgagccgttctgcgtctccgccacgatcccgcaggcgctgcgcattgcgctcggatcggtgcctttcgacagcctgcgcccggcgctgctcagcgtgcgcgacgccgttgagtatgaacaataccgctaacccatctgctccagctggccgcgcaggacctccaccccctgggcgatggcgtcggggttaatggcgtggaatcccatgcgaaaatagttatccggcggcgcggcgttaagaaaatggcgcgccccgggctcaatcagcacgccggcgtgggcggcgcgccaggtgagctgctgggtgttgatctgcgccggggtctgcagccagaaggcgttagcatgttcgcttcccgccagcgcgcgacacgacggcagatagcgctgcagggcggcgtgcagacgctcccagcgctgggcggagtcaaagtggtagcgccgcagatgggtttcataatggccctgggcaaggaagtgggccatctggtactgaatgttggtcggcggatggcgatagaccagccggcgcagggcgcgcgcctcgtcgatcaggtccgggtcggcgaccataaaccccaaccgcagccccggtgacagcgcttttgacaggctgctgacatacaccacccggccgctgcgatcgctggccttcagcgccggcagcgggttgagggtaaagttactctccgagtcataatcatcttcaataatgaccgcgtcatggcgggcggcatgctccagcaactggcgacgccgcgcactgctcatggtcaccccggtgggcacctgatgacctggagtgacatagtagtaatcgcagggacgctcattaagcacgatcccctcttcatccaccgggtgcggcaccacctcggcgtcggcgagcagaaaggtgttgatggcttcgcggaagcaggggttttcgacgccaatgcgggtggtggaagagagcagcagtcgggtcagcaggtagagggcattttgcgagccaagggtgatgagaatttcatccggcgcggcgacaatgccgcgcttgggcagcacccgggtgcggatctgctcgatcagcatcggcacatcctggtcaatatggtcgatgacccacgccgggtcgcgcaccccgccgtgcagccagttcgccgccgagcgccaggtggccagcgggaattgccgggtatcgggctggccgtagataaacgggtagcggtagtgcatccagcccgccggtttgaggatcgactcctgctggctgggggtcatctgcagccggtcgccccagcgtggtgcagccgcttcgcgctgcggtgcactctcgacggcggcaggcgaagcttcatgatagtcgggatgcaggtagtaaccgctgcgtgggcggctaatcaggtagccctcgttgaccagactttcaaacaccagcgcggtggtgttgcgcgagacgcgaagctggctggccaactggcgacaggagggcagcggggtgtcggcggcgaagatcccgctgagaatggcattcaccagcgtctctcgcacctgttcctgcaaaccgcggccaggctgaaaatcaacgtgtaacaggtgacggatcatacggggctcctctggcaataacgcattgcgaccacccgttacgctcagcaaattccataccaccctgccgccatctgacacagcgatgcggcccatctggctctatacggaattgaaaaacgctcccacattaaaaacgtattcagccgccgtggaccggaacgtccccggccactattttgcagaaaccttttcgcgttctggaatgaacccgtctggccaatccatcaggggtgaaataatgaaaaaatcattggcatcaatgtgtctgagcgctgtattaacggtcgctttttcttatcacgccgtcgcggccgatcttccggaaatagaaaaatccggcaccttgaaagtggcgacggaagatgattatgcgccatttaactttatgaataatggccaggccgatggctttaacaaagatatgcttgaggaattacgtaagtacgccaaattccatgtcgaccagagcatattaccgtggaccggattattagcggctgtctccaccgggcaatacgatatggccttaaccggggcggttattaccgatgagcggctgaaggtctttgatttcaccccaccgtgggcctccgcgcagcactatttcgtcaaacgcgctggcgatacctcgctaaataccattgccgatctcagcggcaaaaaagtggggttacaggccgggagcgcgctgctggcgcgtttgccggagctgaaggcgatgctggagaagaccggcggcaagctggggccggtggtggagtatccctcctatccggaagcctacgccgacctggcgaacaagcgactggattacgtgattaacgtggtgatctcggtaaacgacctggcgaaagccaaaccgaaggtcttcgccaaagggctggccgtctccggaccggggtatatggcgtggccgatcccgaaaaactcgccgcagctgctggcctatatgaccaggtttatgaaccacatgaaggagaccggcaagctcgccgagctgcagaaaaaatggttcggcgaaacctatgacaacctgccgaccgaggcgatcaccagcccggaacagtttcacaaactcgccggactgtaatattccgcggcgggcgaccgccgcctgttgttgagaaggagggcctcatggatgcaatttcctggcagttattaatcgaaggcgcatggacgaccctctggatttcggccatcgctatcgccttcggggtggtggctggcctgctgatcgccctggtacggatgctgcgcctgccggtgatcgaccagctgctggtggtctatatcagtctggcccgcgcgacgccgctggtgacgctggtgctatttctgttcctttccctgcccacgatgggcattaacctcgacaagaacgtggccgccatcgtggcgctgacgcttaacacgtcggcgtttaacgctgagatctggcgcaatgccttccgcacctttccgcgcgaacagcgggaggcggcggagtcggtagggatgcgccgctggacctacttccgctacatcatgctgccgcagatgtggatcgagagcctgccggcgctggtcaatgagatgtcctttttgatcaaaggaagcccggcgatcgccgtgattggcgtggtggatctcacccgggtcaccaaccgtatctcctcggtcacctacgagccgctgtcgccgatcctcgccgccggcctgctgtatgtggcgatcatcggctgtttgttgaagctgcagggtatcgcggaacgtaaagccaggcgtctggcgcgctaggaacgggaggcattatgaatcagtggggcgttatctggtcggttcgcgatagctttattgccgggttattcgcgaccctcgaactgtttattaccgccgccctggcggcgctgattatcggtattgcgctgtgttattttagcgaatatcaaaagaaagtgattaaccggattattattggtttcgtcagcctgatgcgcgcgatcccttttttgatcctcgcttatcttctgtattacggactgccgcagctcggtattagcatggagccgtggaccgccggtttactggccctgattatttatcatggcgcctatttctttgaaatattacgcagccagcggcgggtattttccggcggatatattgaagcggcgattgctcagggcttttctcgctatgccatttttcggcggattattttacccaatatcgtctcttccgccttaccgctgatcggcaatcagctgattatttgcctgaaggacaccgctttcctgagcattattaccgttcaggagatcaccgccgccgccaacagcgtccaggcgacctattttattccgtttaacgcctttatcgtcgccattgggctttactgggcgatcagcattctgctggagctgctgattaagcgcctgaccgcctggggagccaaaagaggaatgagccatgcctgagtctattgccgtaagcgtcaaaaacgtctccaaacagttcgataatgtggaagtcctgcgggatattaacctgacggtggagaaggggaccgtggtgagtattctcggctcgtccgggtcgggaaaatccaccctgctgcgctgtatgaactggctggaacagccggaccgcggtgaaattcatatcggcggtcagcggctggggattgatgaacagcgcggccgggcgatgtcgcaccgccagctggccaaaatccgcgagcgggtggggatggtctttcagagttttaacctgtggccgcacctgaccgtgcagcagaacgtcagcgaggcgctgctgcgcgttaagggcatgaaacgagacgaggcgaacgccatggccatgcagcagctggagaaagtcggcatggcgcacaaagccgatgtctacccgatcactctctccggcggacagaagcagcgggtagcgatcgcccgttcgctggcgatgtcgccggaagttattctcttcgatgaaccgacgtcggcgctggacccggagctggttaatgaggtgttgggggtaatgaaagcccttgccgccgagggctacaccatggtggtggtgacccacgagatggattttgcccgccaggtgtccaatgaggtggtgtttctggagaagggactgctgattgagaaggcgccgccggagaagttcttcactcagcctgactccgaacgcgtcaggcagtttctgcaaagcagccgttagtccggcctgcatcccctgccggtatcgccgacaggggatgcgtcgggtttcgcttaatcccggtcgatagcgaacggctgccacgcctgacgcaccggcatcacctccacccggttaatgttcatatgcgccggcagcgtggcgatataaaacatctgctcggcgatatcgcgcgcgctcagcggcgtggtgccgcgatagagcttatccgatgccgcctggtcgcctttggttcgcaccagggtaaattcggtctcggcaatccccggcgccagatcggtgacccgcacgccggtgccaagcagatcgcagcgcaggttatagctgaactgcttcacaaacgccttgctggcgccatacacatggctgccgggatagggccactgcccggcgatcgagccgatattgataatgctcgccccggcgccatggcggatcagcgtcggcagcagggcgtgggtcatcgtcaccagaccagtgacgttggtgtcgatcatcgttttccagtcctccagcgccacctcctgcgccggcagtggcgacagcgccagcccggcgttgttgatcagggtggtgatatcggcgaaatcggcgggcagcgacgccacggcggcagccaccgcctcgctgtcacgaacgtcaagctcaataatatgcaccggcaccctggcggcgagtctgtcctgcaaggccttcagtcgcggatagcggcgcccgctcagcaccagcgaccagcccgcgtcggcaaacacctgcgctgccgcttcgccaaaacccgaggtcgccccggtgataaacactacgttgctcgttgccatctcattctcctgtgcggttgtcccttcactataaaaacgccggacgacaaggcacagagccagacgacgggcggggatgtgacaccgtgtcacatcgttatgcgcgcactggctctatccgatttgcgcggccaaggccaatgatgaagccaaccactacgacatgagagagggcagggtatgaagctggcaattcacaacgaggtcgcggtaagcaatgacgaagttcggcaattagatcgcgcctatgtgtttcattcatggtcgatgcagggcaatctcaacccgctggtcatcgccggggcgcaaggctgcgagctatgggattatgaggggaacacctggctcgatttcagcagccagctggtgaacgtcaacattggctatcagcacccccgggtactggcggccatgaaggcgcagctggaaaccttggtcaccatcgcgcccgccaccgccaaccttgcccgcggcgaagcagcgaagcgcatcgtcgacctggcgccggcgggcttcagtaaggtgttcttcactaacgccggggcggatgccaatgagaacgcgattcgcatggcgcgtctctataccgggcgcgacaaggtgctgtcggcctatcgttcctatcatggcaacaccggcagcgcgatcgccgctaccggcgactggcgccgggtgccgaatgagttctcccgcggccacgttcacttcttcaacccctacctttaccgcagcgagttcaacgccgcgactgaggaagaggagtgccagcgcgcgctggcgcatctgcggcggatcattgaatgcgaggggccgacggccatcgcggcgatcctgctggagtccatccccggcaccgccgggatcctcgtgccgccggcaggctatatgcagggcgtgcgcgccctggccgacgagtttggcatcgtgctgatcctcgatgaggtgatggccggctttggccgtaccggcagctggttcgccttcgagcaggatggcgtggtgccggatctggtgacctttgccaagggggttaacgccggctacgtgccggcgggcggggtgctgattagcgagccgattgcccgctactttgacgaccacttctttgccggggggctgacctactccggccatccgctggcgatggcggcgattgtcgccaccatcgacgcgatgaaagaggagaaggtggttgagaacgcggcctctatcggcaacgaggtgctgcgccccggtctcgaggcgctggcggagaagcacgccattatcggcgaggtgcgcggtcgcggcctgttccaggcgctggagctggtgagcagccgtgaacaaaaaacgccgctgaccgccgccgacatggctgcgatcaaaggggccctgaccgaagccgggctgctggcctttgtggtggagaaccgcattcatgtggtcccgccgtgcaccattactgctgagcaggtggcgcaagggctggcgatttttgatgcggtctttgctcgctttgccagcctggcgaagtaggggcgggggccggatactgttgcccggcggcgcgcttgcacgggcctacggggtgtgagcctgcgagtggatcctgtaggccgggtaaggcgcagccgccacccggcgaaatcaaggataccgtgcctgatatcttgcccggcggcgctgcgcttgccgggcctacggggtgtgagcctgtgaatggatcctgtaggccgggtaaggcgcagccgccacccggcaacatcacgggtaccgtgcctgattattgcccggcggcgctgcgcttgcacgggcctaaacgccagccggacagttccctctcccttcgggagagggccagggtgaggggaagcactgcagtgttgttgtttatgttatcggtggcttcagcgtagtttgcgctcccggttaattgtctgcgttatgtcattcatggcgcagggagcgcacagggggcggccagtcgccgccgccccctgtacccccgggctccggccagcaacatcgccgctgcgcggtgccttcgacttatccctgcaggcttcgggtcgggccgaggcagcgtccgtgcaaaacacggccctcagcccgcatccatgcgggctgccccggccttccgggaacgtctcagcgatgttgaggccgcaacaccggcagtttcagcaagactggtgaataaattaacgacaggttgcgcgaatcctaggtcgggtaagcgaagcgccacccgacaaaacaaccgcacatccgctgacctcacctcatccggtgctctccgttgaccaacgcttcgcgatcgaaaaagcgctggatcacgccctccgccataaacgccgcccgatcggacatatgggcgatgacgtcggcatcgtggctgaccagcagataggtcatgccgtgctcctgtttcagacgattaagtagattaaggatttccgcctgtaccgacatatccagcgccgaggtcggctcatccagcagcaggatctgcgggcgcagcagcagggcgcgggcaatggccacgcgctgccgttggccgccggagagctgatgcggatagcggcgcacggcgtcggcggccagacccacctgctcaagggcggtggttactcgcggggcaacgtcgcggatgccgtggatctgcagtggctccgccagggtgcgccacagggtatggttgggatgcagcgaggcgtacggatcctgaaacaccatctgcacgttgcgccgcagatcgccctgaaagcgggcgcccggcataatggcctggccgagcagatccacgctgccgcgccattcacgctgcaatccggccagcacgcgcaaaatcgtcgatttgccgcagcccgaggcgccgatcaggctgaaggtttccccggcgtcgacacggaaactggcggcggagaccgccgtcttcgcgccgaatgtaacctgtaaatcctgaagattaacgatcgccatgggctgtctccgtaaagtcctgggttctgtcgagggtcggcagcatctggccgtaggtgtgcgcatttggccggcaggtccacagggtgcgggtgtaagggtgcgtcgcgctcggcagcgcccgcgccggcatctcgtcgacctgtctcccctggtacatcaccagcacgcgatcgcaatgcgcggctaccagcggtagatcgtggctgatcagtaacatggtcatctgccgctgcgcgctctgctccaccagcagctcgaggatctggttgcgcaggcgggcgtcgagggccgaggtcggctcgtcggctatcagcaccttcgggttattgagcagcgcgagggcgatcatcacccgctgtcccatcccgccggagagttcgccgggatagcggctgaggaccggcagatccagaccgacggcggcgatggcgtctttgaccgcctcggcgcgcgcgcggcggctgagacgctgatggagggttaacgcctcctccagctgcgtctgaatggtctgcaccggattcagcgcatagcgcgggtcctgcagcaccatggcgatatcgttgccgcgcagcgcgcgccagccgcgggcgctgagggtcagcacatcgcgccccagcacctccagccgttcagcgctcaccaccccgggcttgcgcaccaggcccatcagcgcccgggcggtcatcgatttgccggagccggattcgcccaccagcgccagccgctcgttgccgagggtgaagctgacgttgtccaccacccgggcggtgggatagtcgacggcgagtccctggacggtcagtcggatgtcagtcatgttgcggctccagaatatcgcgcaggccatcgcccagcaggttaaacgccaggctggcgagcaggatcgccgcgccggggatggcggcgatccaccactggtcgaaaatcacctgcatcccgtcggcaatcatcgctccccactccgccatcggcgggcgggcgcccaggccgagaaagccgagcccggcggcggcgaggataatgcccgccagatcgagcgccagccggacaatcgccgacggcagacacagcggcagaatatggccgaccagcagccgcccgccgcgaatgcccagcatctccgccgcggcgaggtagtcgctatggcgcaggcgctgaatttcgctgcgcgcctgacgggcgtaggccggccaggtggtcagggctaacgccagcgcgccgttgaccagccccgggccaagcatcgccacgaacgcgaaggcgaggatcaggcgcggcatcgacatcaccacgtcggtaaagcgcatcagtatccgctccagccacccgccatagtaaccggagaggatacctaccagcagcccgacgggcagggtaatggcggtcaccagcgccaccagacccagcgccgggcgggcgccgtagagcaagcgcgacagcaggtcgcggccgtagctgtcggtgccgagccagtgtcccgccccgggcccctgcagacgagcggcggcatcctgccagttgggatcgtgcggcgccagccacggggcgaacagcgcggtcagcaccagcaggatcaccagggtcaggccgctgaaggcggcgggtgagcggcgcagacggcgtaaaaacagataagtcggcatcagcgcaccctcggatcggttaaccgtaccagcaggtcggtcaggttattgatcagcacaaaactcacgccgatcagcagcgtgccgcccatgatcgccgtggtatccccggcgaacagcgccgtggtgaggtagcggccgatccccggccacgagaagacggtttcggtgagcaccgccccttcgagcatggaggtccaggctagagcggttaccgtcagcagagtgccgcggatattgggcaggacatggcgcagcagaatcgtcatctctccggcccctttggcccgcgccagcagaatgtactctttgttcatctcgctcagacaggcggagcgggtcaggcgggtgatgctcgccagcgagtaataggccagcaccagcaccggcagcgccagatggccgatcgcatttttaaacgccgcggtatcgccggagagccaggtgtcgatcagcgcaaaaccgctgcgtggctcgacggtgtactgataaatatcgtcgaggcgacccgggcccggcgcccactgcagccgggcgtaaaacagggccagcatcagcaggccgagccagaaaatgggcaccgagttgcccaacagggtaaaggtgcgaaccgccagatcccacggcgaaccggcgtaacgggcgcacagcaccccggcgacgatgcccagtaccgcgccgacgatcagcgccagggtcgccagctcaagggtcgccggaaagaccgccagcaggtcgtggagcaccggctggccggtagcgctggcgatgccaagatcgccatgggccaggttgaccaggtagtgccagaactgcaccggcagcggctggtcgagacccagctgatggcgaacctggtcataggtcgactggctggcatggtcgccgacgatctgcagtacgcggtcgacgggcgacagcgcggagagcgagaaggtgaccagcaacagcccgaacagcgtgagcagcagcgtaaacagcccctgcagcaggcgggtaaggtgagtgggaaacgatggcatggaaaatggaaattcctggtatatcagcattgtacccggcggcgcgatgccgaccgggcctgggtgaggagtcggtcatccgggcagacaaggccgccgtacccggtgacaaaacccgcttacttggtcacgttatcgtaccagaccatgtcggcgttcagtccctgctgatagcccttcacgttgtcacgcaccacgatctgggtttttccctggtcaatgaagacgtacggcgaatgctggagcagggtttcctgcatcgttttgtacaggccgaggcgtttcgccgggtccggctccgccaccgcggcgagggtggctttattcagctcagggatctgccagccgttgagcccggccacggtgctggatttaccatcgttccaggcaaaggcgctggcattagagtgggcatcaaagtagtccgggatccacaggcggatcgccgcctgatgctgcttcgcgcgcacccgggcatagacctggctgccggcggcgggtagcagatccaccttcaccccgccctgggcaaagctggcctgcagcgattgggcgatggtgataaacggcggtttgttctccacatcgagggtgaagtgggcatccttaatgcccgctttatcgaggatagccttagctttttgcggatcaaaggtgaacggattagtctccagcgcccccggcaggccggccggcaggaagctttggtgaataaagtactggcctttcagcagatttttggtgatgccttcataatcgaccagccagcgcgccgcctcccagaaggccgggttattgagcagcgggttggcgctgttggcggtattaaacaccaggtagttctgctcggcggacgggatgctcagcaccttcacgccgggtttatcctgcagggcggcaatctggtcagcgccgagatcgcgcgccacgtcggcatccccctgctggatcagcaggcggcgggaagccgggtcggggacgtttttaataatgatgctcttgatcttcggcgcgccggtgggggagctggcgttggcctccagcacgatggcctgatgcggctggtagacgcgcattttataggccccgctgcccgccgagtgcattttcagccagtcgttgccgaagtcgttatttttcgcgttcggcgccacctgtttttcatcaacgatagaggcgatgggggtggagagaatattcagcgccaccgccgggctgacgtcggcggtccagtgcagcgtcagggtatggtcatcaatctttttcagctggctggcgatgttgtccggctgccagccgagcacgttgagaataaacgccggcgatttattcagcgtcaccgcgcgggtgtaagagaaaatcacatcttccgggcgcagcggattaccggaggcgaatttggcatccggcttcagtttaatggtcagggttttcgccgccggatcggcctgccagctttcggcgaggatcggtacgattttttcagggttgttgcggtcgggctgcaccagacgctgatagaggctggggaccgtctgaatgctggagagttcgttcgcttccgccgggtcgaggctgacgatatcgtcgagaccctgggcgaccaccagcgtgttgggcggcgtggcggcatgcgcggcggcggagagcgccgacagtagcagtaaaggcaacagttttttggtcatgtgcaatccctgaagaatggttattttattgttttatgcctcgctacgttaggccgcttgccataaggcgtaaagtcaaaataaggatatccttatgctaaaaatgcatattcaagaacgacaggttattgccggtcgcgcagaagcgcctttctccgctgcggggttcttgctataacgcattgtctattgcgaggaggtgggtgtgccggaaatcaatgagtatggccagcaggtgaacgacctggtccctggctggcagggggcgcaagtcctgcgccggacggcgttaaatggccgtttttgccgcctggagccgctggacgttgaccgtcatgcggcggatctgtttgccgcctatgcgctcggcgacaacagcgactggacgtggctggcgtctacgcggccggagagcgtggcggcgaccgcccactggatcgcgggcaaggtgaatgatgatgccctggtgccgtatgcggtggttgacctgcgtagcgagcaggcggtgggcatcgttagctatatggcgatcgaacgggaaatgggcacggttgagatcggccatgtcacctggtcgcgacggatgaaaaacaccccgctgggtaccgaagcggtctggctgctgctcaaaaacggctttgaccatggctatcgtcggctggagtggaaatgcgattcgatgaatgtcgcctcgcgccgcgccgccgagcggctgggctttagctgggaaggacgtctgcggcagaggctggtgcgtaaagggcggacgcgcgacagcgatatgctgtccatcatcgacggcgagtggcctgcgcgcgatgcggcgctgcgggcgtggctggcggcggagaactttactgccgacggtcagcagattaagcgcctggaggcgtttcgctaacatcaacctatggggccaaaacccggaacggcaccccgatcgcgctgcgcttaccggggctacgttacatcgcctcagggtaggccgggcaaggcgtagtcgccgcccggcattgacctgttagcggcgaaccggcgcgtcgccagcgacataatacgtcgcggtgctgcgcggcagcggctggcggccgcgaatggcgtcggccatcttctcgccgatcataatggtggtggcgttgaggttgccggtgatgatctgcggcatgatcgaggcgtcgaccacccgcaatccttccagaccgtggacgcggccctcgccatcgaccaccgccatctcgtcgtaacccatcttacaggtcccgcacgggtggaacgcggtctcggcgtggttgcgcacaaactcatccagttcggcatcgctctggcattctattcccggactgatttcgcggccgcgatacttatccagcgccggctggttcatgatctcccgggtaatgcggatggcgtcgcggaactcctgccagtcctgctcatgggacatatagttaaacaggatcgccggatgggcgtgcgggtcgcgcgacttcaggcgcacgtggccgcggctgggcgaacgcatcgagccgacgtggcactggaagccgtgctctttcaccgcgttggagccattgtagttaatcgccaccggcaggaagtggtactgaatgttcggccaggcgaactctgcgcggctgcggataaaaccgcccgcttcgaactggttgctggcgccgatgccggtgccgccgaacagccactcggcgccgatcttaggctggttccaccactgtagcgccgggtagagcgataccggctctttgcactcgtactgcagatacatctccagatggtcctgcaggttctcacccacgccggggagatcgtgcaccaccgggatatcgaactgcctgagcagctccgggttacccacgccggagcgctgcaggatctgcggcgaggcaatcgccccggcgcacagcagcacctctttgttggccgtcgcttttgacgggatcgtgctctctccctccagccactcgacgcccaccgcgcgcttgccggcaaaaataatgtgatcggtcagcgcatgggtgcggatggtcaggttcgggcgaccgcgcgcctggtcgagatagccgcgggcggtgctggcgcgacggccctgcggcgtcacggtgcggtccatcgggccaaagccttcctgctggtagccgttgagatcgtcggtacgcggatagcccgcctgcaccccggcttcaaccatcgcctcgaagagcggattattgcccggcttcggcgtcgtcacgctcaccgggccatcgccgccgtggtagtcgttaggcccgatatcgcgggtttccgctttccggtagtagggcaggcagtcgagatagctccagtgttccagacccggctctttggcccagttatccagatccatggcgttaccgcgaatgtagcacatgccgttgatcagcgaggatccgccgagccctttgccgcgtccgcactccatgcggcgattgttcatgtacggctcaggttcggtctcgtaggcccagttgtagcgcttgccctgcagcggataagccagcgcggcgggcatctgggtgcggaaatcgaaccggtagtcagggccgccggcttccagcagcaggacggtggtgtttggatcttcagtcagtcgtgttgccagaacgttgccggcggagccggcaccaataatgatgtagtcaaattgcaaaaaaacctcccggttaaaatatggactggaatttacccatctcaacctggatggacttcacctgggtgtaactctgcagcgtcatgacgccgttctcgcggccaatgccggagtgtttgtagccgccaaccggcatttccgccggggattccccccagctgttgatccagcagatgccggcttccagctggtggataattcggtgagcgcggttgaggttgggcgtcaccacgccggcggcgaggccgtattcggtggcgttggcgcggcgaatgacctccgcttcgtcggcatagctgaggatcgacatcaccgggccgaagatctcttcgcgcacgatggtcatctcgtcgctgcaatcggtaaacaccgtcggggcgacccacgcgccgttatcgaaaccgtcgcctttcagcgcctcgccgccgcacagcaggcgcgcgccttcgcgtttgccgctctcgatatagcgcagaacgttgtcgcgatgggggaagctgaccagcgggccgaagttggtgtcatcggcaaacagatcgccggcgcggatgcgggccacccgctcgaggatcttgtgctcgaattccgccttccgtttcgccgggacaaacacccgggtgccgttggtgcacacctggccggagctgtaaaagttggccatcatggcaatatcggcggcgaggtcgaggtcggcatcgtcggcgataatcagcggcgatttgccgcccagctccatggtgacctctttcagtgatgaagcggccgagttggccatcacttttttgccgctggcgacgccgccggtgaaggatattttggcgatgtccggatgctcggtcagatactggccggtttccgcgccgatccctggcaggacgttaaacaccccgtccggcaggcccgcttcgctgtaaatttccgccagcttgagggcggtcagcggggtgacttcgctcggtttgaaaatcatcgcattgccagcggccagcgctggcgccgatttccacagggcgatctggatcgggtagttccacgcgccgatcccggctaccacccccagcggttcgcgacgggtgtagacgaaggaactgtcgcgcagcgggatctggctgccttccagcgccgggatcaatccggcgtaatactccagcacgtcggcgccggtgacgatatcaacggcggcggtttcgctgaggggtttcccggtatccagcgtctccagtcgcgccagctcgtcgttgcgctggcgcagaaggtcgacggcgcgacgcaggatgcgcgagcgttccatggcggtcatcgccgcccagattttttgcccacgctgcgcgctctcgacggcgcggtcgacatcctcgcgtccggcagcctgaacggtcgccagcacctcgccagtggcagggttgatggtctcgaaggtgcgaccgctggtggccgatgtataaccaccattaatataaagctgctgttctgccattcgggacataacgcctcctcggttatgggttcggtaaatgctgacgaataaagtggctggtcagcgactgcgccagcgttttatccagcggtttgccgctgagcgccgcccgcagccacaggccgtctatcagcgccgccagcccgtagccggcctcctgcgcctgctcgcgcggcagctcgcggcggaattcgtacaccaggttcgacagcaggcgacggctgctgacctgctgtaaccgataaagcatcggctggtgcatgctgctggcccaaaaggccagccaggccttcatcgccgcgctgctgatctgcgtctcatcaaagttgccgccgacaatcgcctgcaggcgctggctggcgctgccgtccggcagagcgtgcagacggttgagcaccgcgtcgcgcagctggctggtgatgtcgcgcatggtcgcctccagcagaccatttttgtctttgaaatagtgactgatgatccccgtcgatacgcccgcccgccgggcaatttgcgcgatggtcgcgtcgtgcattccgacttcatttattgcgtccagcgtggcgtcgatcagctgcctgcgccggatcggctgcatccccagtttgggcatttttgccactccattcatcagcgttggttaactattaaagcggtttttgattggacgttcaatataaaatgtgtcttaattgttgcggatttggattttaatagttacaaaaacagtggggatactggatgacagatctttcgcaaagcagagaaaaggacaaaatcaatccggtggttttttatacctcggccggactgattttgttgttttccctgatgacgatcttttttcgcgatttttctgccgagtggattgggcgcaccctggactgggtgtcgaaaaccttcggctggtactatctgctggcggcgacgctgtatatcgtcttcgtcgtctgcattgcctgctcgcgcttcggctcggtgaagctcgggccggagcagtcaaagcccgagttcagcctgctgagctgggcggcgatgctgttcgccgccggcatcggcatcgacctgatgttcttctcggtcgccgagccggtgacgcaatatatgcagccgccggaaggggcggggcagaccatcgaggcggcgcgccaggcgatggtctggaccctgtttcactatggcttaaccggatggtcaatgtatgccctgatgggcatggcgctgggatactttagctatcgttataatttgccgctcaccatccgctcggcgctgtacccgatttttggcaaacggatcaatgggcccatcggccacagcgtcgatattgcggcggtgatcggcaccatcttcggcatcgccaccaccctcggtatcggcgtcgtgcagctcaactacggtctgagcgtgctgttcgatattccggactcgctggcggcgaaagcggccctgattgcgctgtcggtgatcatcgccaccatctcggtcacctccggggtggacaagggcatccgcgtgctctccgaactgaacgtcgccctcgcgctggggctgatcctgttcgtgctgttcatgggcgatacctccttcctgctcaatgcgttagtgctcaacgtcggcgactacgtcaatcgctttatgggcatgacgctgaacagcttcgccttcgaccggccggtagaatggatgaacaactggacgctctttttctgggcgtggtgggtggcctggtcgccgtttgtgggcctgttcctggcgcgcatttcgcgcgggcgcaccatccgccagtttgtgatgggcaccctgattattcccttcacctttaccctgctgtggctgtcggtgttcggcaacagcgcgctgtatgagatcatccacggcgacgcggcctttgcccaggaggcgatggcccacccggagcgcggcttctacagcctgctggcgcagtatccggcgtttacctttagcgcgtcggtggcgaccatcaccggtctgctgttttacgttacctccgccgactccggcgcgctggtgctggggaacttcacctcgaagctgaaggacatcaacagcgacgccccgaactggctgcgcatcttctggtcggtggccatcggtctgttgaccctcgggatgctgatgaccaacggcatctcggcgctgcagaacaccacggtgatcatggggctgccgttcagctttgtgattttcttcgtgatggccggactgtataaatctctgaaagtggaagattaccgccgggtcagcgccagccgcgacaccgccccgcgcccgatgggcctccaggatcgtctgagctggaagaagcgcctgtcgcggctgatgaattaccccggcacgcgctataccaaactgatgatggagacggtgtgctacccggcgatggaggaggtggcccaggagctgcggctgcgcggcgcggcagtggaactgaagagcctgccgccggaagagggtgagaaccttggccacctcgatctgctggtgcacatgggcgacgagcagaactttatctacaagatctggccgcagcagtactcggtgccgggctttacctatcgggcgcgcagcgggaaatccacctattaccggctggagaccttcctgctggagggcagtcagggtaacgacctgatggactacagcaaagagcaggtgatcaccgatattctcgaccagtacgagcggcacctgaactttatccatctgcatcgggaagcgccggggaacagcgtgatgttcccggatggctaatcagggaagcccccgtcggggaaaggctgacgggggcgatggtcgttactggtagttaaaggcgtccgggtggttgtcgaggctgccgctgagggcggcaaacagcacggttttgccatcgatggacagggcatcgctgacgttaagccaggtcagcttctcctggtcggttttttcatcgaccaccgagtaaacgccggacatctgtttgcttttttccgaccagatcaccgcgatacgttcatggccgcagtcgtggggtttgcaggcgcttaacacctgccaggattcgctacccagtttcaccgtctgcgcgggcgaaccggtgccgccggtggtcacccaggcgggcagctgatggcctttgaccatctggttaaacgacgcccgggtggcggcatcgtgagccagactgttcagcgtgacatcgccttgcgccataacgctggcggaggcggctaaggcgacgatagcggtaagagctttaaacatgtttcctcctggacttattccgtcctcataacaagcctctttatagtgagcgtagagaatgattaatgcaaactctgacatattttctgtgaatgattagaagcggtgcgcgcatggacgttacgctaagcgatatgccatgatgcggattgatttattttccaaatatatgcccttgggataaagcagttagcgaagtggcatagttattcaggcgataaagcatggcgtatgtgaatcatctactgacgtttattgagagtaatccggcgctggcggtggggtttaatcttattctgctgctgctctccggcatatttgcccatcttttatgcaagttcttgctgattaaagtggtgcgtaaggtcttctttagtagccacaaacaggatgtgccgctggagaaggatcgacgcatcgccgaaaagctgtccaatttcattccggttattatcgtctattacgttctgcagtttatgccggcgatgccggcatcgctggtgacggcgattaatactatctgcgggatcttgttttttatttttatgtcggtgtttttcaacgagatgctggatattgtcaacagctcctatctgcgaaagaccaaacgtaaaaatcattccattaagggctatatccagataggcaaaatcttagtccacatcctggcggcgatcatgatcctcgccgtgatgtcgaacaaatcgccgatcattatcatctccagtctgggggccgtggcggcggtactgatgatcgtgttccagcatactctgctgtcgctggtggcgaacgttcagctgtcgtccaacgacgtgctccagctgggggactggattgaaatgcctgacaagaacctcagcggtgaggtgacggatatcgcgctgcacaccattaccatccgcaactgggacaataccatctcccgtatcccgaccaagaatttcctcaccgagacctataccaactggcaggcgatgttctcctccggggcgcggcggatcatgcgcagtatcgccatcgatcagcactcggtgcgttttctcgaccaggagatgctctcctcgatgctgaccatccgcggggtgagtgagcctctggcgacgctgcttgacggccgggatcccggcggcgtggccgaccgctggtttatcgataacgggctgaccaacctgaccctgtttcgccactatctgatgcactatctcgccgagcggccggatattattaaggagatgtacattgtggcgagaacgctgaaaccgtcgccgtcgggcatcccgctggagatttactgcttcaccacctcaacgctgtggaaagactacgaaaacacccagtcggcgatatttgagtacattaccgcggtggccggacagttttccctgcgcctctatcagtatcccgccgggcacgatttttggcgtctctcccaggagcacgccgcccggacgggcctgccgccgtcggccgaaggctaagcgctgatctgctggcgccagagggcgatctcctcctccagccaggcgatgaaccgggcgacttccggccggttctccacctgcggggagacggttagccagtagtgccaggggtaggggacggtgacggcggtgagctgcaccagctcgccgcgggctatcgcccccgccaccagggagcgccgctccagcgccacgccggcccccaggcggaccgcctccagcaccagattagagtcgttcaggcgcaggcccgcggggacgatcggcttttccagccccgcctggctgcaccaggcgttccaggactccatggaaaaaataatatcgctggcggcgatcgcctgcggggtggtcggcaggttaccgccgcgatagccgggggcggcgaccaccagctgttcatcggcaaacagatgccggctttccatcccctcccagtcgccttgccccatgcgaatggccagatcgataccctcctgttgcaggttaaccaccgccaggctggtcagcaggcgcaccgcgatctgcggatgccgcgcctgaaagcgcgccagccgcggcagcagccagtggcagccaaaggaggggagcgtcgccagggtcacttccagggtgcggggtttgatctgcaccatgcgcgtggcgtcggcgatgtgctgtaacgcctcgcggatttgcagggcatagagccgtccttcttccgtgatgcgcactccgcggccgtggcggataaagagcgtgacgccgaccagggcttccagctgtttgatgtgctggctgaccgccgaatgggtcacgctcatctcgtgggcggcctgcgttacgctgccgaggcgcgccaccgcctcaaagctgcgcaggctggcgacagggggaaaatctgccatggtgatctcttagtcagtgagtcgatacgttaacgttactaccgggttagcgggttttatagccgccgcgaacaggctgaaaaaggggctaaatgctgcctcagtcggtatagcacaaggggaactggagggctacagcgagtcgcctatctgttagttttactaaccattgcggtaagtatctggtgatattcgcggcatcggttttccagtaaggtaaagccgcaacctctttatcgcaggcaggagtgacgatgaaactcattggtatgatggattcaccttatgtaagacgcgtggcggtttctctggcgctctatggcgtggaattcgagagcctgccgctatcggtctttagcggctttgacgaattttcccgcattaatccggtggtcaaggcgccgacggtggtgctcgataacgggacgcagctgatggactccacgctgatcctccactatttcgaaacgaccaatccggccgggcgccggctgcttcccgcgcatcccgaggcgctggcccgcgatctgcacctgctgggggtgatcctcgccgcctgtgaaaaagcggtccagcatgtttatgagcaccgtctgcggccggaagagaagcagcatcagccgtggatagcccgggtgaccggccagctgctggccgcctgtcgggagtgggacgcccggctggcagaccgcgccgccgccgcgcagccggatcaggtgctggtcaccagcacggtggtctggtcctttatccagttgatgatcccggcggtggtgtcggccgcggcgtttccgcatattcgcgcgctggcggagaagggggaggcgctgccggcgtttcaacagtatccgctgggttaacggcagggggcgttggattgcagccggacgaagacgttatcgcccggctgggttgcgctcagcgtcttgccagcgtcaccgcgtgttgccaggactgccatcgctgcacaagccgatgatgccggatcaggtctggcgcataagtgatgtgttctggtaaaaagggctgaagctctgccaccgtcagcttgtgcaacgctttacgcgccagcagtgccgcaccggtcgccgacagctcggccacatcgctgcgcatcaccggacaccccagcaggtcggcctgatactgcattaaccagtcgtttttggtggggcccccatccaccagcagcgtgttgagcgtaaagccatgatgggcacgcatcgcagtgattacatcggcaatctggtaggtaattgactctagcgcggcacgaatgagatgggcccgcttcacgccccggcttaatccatggatcaaaccgcgggccttatcgtcccaccagggggcgcccatgccggtgagcgccgggacaaaaaagacgcctaaggtggagtcgaccgagcgcggcagatcattcagcgcctgggccagttcgccgggagcgcgttcgctcaatccggtactgtcggccatccacgccaccgcatcgccggtatggggaatattcccctcgagtgcatagaccagtttttctccgtcgtgccaggccaccgtggtggcgagattactgacgtgacacgccaccgaatcaacgggcgccatcaccgaggtccctgtaccgtaagtggctttaacgcaaccggcggcgcccagaccgtgggcgaaaagggcggcatgcgaatcgccaatcatcgccattaccggaatgccatcagggagggtggctaaacccgcggtgtaaccaaacaggccgctcgaaggtttaatcaccgggagtgctgcacgcggaatgccaaacagggcgagcatatcggtatcccagtccgctgtgtgcaaattcatgagctgcgtacgagacgcgttggcataatcacaacaaaaatgctggccttgcgtcaggtgccagagcagccagctatccaccgtaccgaggcaaatctcgccatttttcgctcggttcagaccatccggagtgtggtccagcagccagcgcattttcgaggcggaaaagagcggggcgactggcaggccggttaccgccttgatctgcggctcatgaccttgttcacgcagcatgtggcaaaatgcggcagtacgtgcacattgccagctcagggcgggcgctatagcctcgcccgtttcccgataccagcccacgacggtttcgcgctggttgctgatcgccagggcggctacacgctccgcgccaacggcggccactgcgcgagaaatcacctccagcgacgcggcaagcagaagctccgctgactgttctacccatccttcctgcggcgtagcgatctcaagcgcgcgggaaaattgcgtaattacccgcccgtggctgtcgaaggcaacggctttggcattggttgtgccctcatcgagggcaataataatatccttgtttaccgacatagcggcctccggcctcactggtggagataggtcgacacgcccaggtagcgcgtaaatgcctcgtgcaaaattgcggcactggcggaatggttcatcgcgacatggtgctcaaagccattgcggcagatccacgacagcagattttccaggtggggaacctgaatgaccgcccgacagcctaccgtatcgaggggatcgtcaaccgaccgaccttcgccgacgtaggctttgatttcgccagtcaggtcgtcggtgctgaggcgaaaataggtcagcgcgccgcttttcatgcgaccatgcacggcaccgcaggtgttttctttgccgacggtggtgccgataatatcggccgttcccatgtgcggcgactcaaggctggccgaggcaaagttcccgcaatgaaacagcacacatttatcgcgatcgtcgccgaagttattgttccagtccgcgatcgaggcggggctcaggttgctgctggcgagcgcatacatggagagcgcgcccatgacatcgacctcacaggcgcttggcatcagttgtccggacatcacgctcatgatggagcagacgttaatccccagattttcctgcagcgaggtccagcactgaattgcggtggtgtcgatgtcgttggcaacaatccactcgctcaggaccacaaacagttttgccatggtgaccagtttatctgccggaataccgctggcgtcggcattatcgatcagcaggcggcgcttctcatccacacgaatatcgtcatcacgcagggctttaatccgggtaaacacctctgatagatctaacgtttccactgcgatgcctaaacgttcgagcagcttttcgctgtagcgcacggtgttaaagcccgctggacgggcgccgatcgcgccaacgcgcacgccgcgcatactgttcaccacgcgacatatctgcgtgaagcgccgcagatcctgctcaaacacttcgccactgagcgcgcagacgtgctgggtggtcagcgtaaacgggataccgtactggcgcaggttgttgcaaagggaaattttgccgcagaagctatcgcggcgcgtcgacaaccccattttatccagattatcctcttcggcctgaataagcaccgggacgttgagaccggagaggcgcagcgtttcggcgatggctttctcatcgccaaagttgggtaacagcaccacgacaccgtgaatattgtcgcggtggctgcggaacagctcggcgcaaattttggcatcctgccgggtttccacgccacccagttccgtctgggatggatcaagcataatggtgttaatcccaagacggctaaacagggctaccgcctgttcgcgcgcttcggcgaccagatagctggggaaaaatccccggttgccaataatgacgcccatggtgagttgttgaggaattcgggacattgcgttctctccagtaagatgttcttgttatttttcaggatgctttttttatgtgcagcttgcgggcgtgcttcaccaccccggcggcatcgatttcatggcgcgcgcgcgtggcggcgcgatcggcggcaatggcgtattgcccgtcaggaatacctaagcgccgcaacgggatcgcgcacccggcctcggccagcacttccgccaccaggctcccgacgccgccgttgacgttgtgttcttccaccgtgatcgcggccggacaggactggattgccgccagtagcgcctgggtatcacaaggacgaatagatgggacactgataacggtggcgtcaataccttctgcagcgagttgtgcggcggcttccacaatttcatgtaccgttgagcccatggcaaccagcgcaatatcgcgccccagacgcagcacatcaatgttgcccggaacaaaccggtaacgttcatcatgcagttccggcagcgctttaccgtcgaggcggatatacactggcccgacgtgggcaagggcataatcaataatctgccggcactcgccgggactggacggcgcgtaaatttcaatattgccaaaaccgcgcagaatggcgatatcgtcaatactgtggtgggtgctggccagtggaccgtagctggcgcccgcgttcagcccgaacagtttgacgttggtgttgttgtagcaaacgtcgaccttaatctgctcattggctcgtgagatgaggaatggcgcggcgttgcaggtcacggccactttcccccccagcgccagaccggcggcagcgccaaccagcgtctgctcggcgatgccgacgttgaccagccggccagggaatcttttgataaacggagcaattttcgccgttgaggtggagtcggccaccaccggcaccagatccacgccgcggtctacggcatcaataaaggcattcaccatcaccgtggcgagatgttcgctattactcatctttcagttcctccagcgccagttcaatttcttctcctttcggtacccggtgatgccactcggggcgtccctgaataaaggaaatacccgcgcctttggtggtgttagcaatcacgacgtgtggtttcccgttcggctgcaagcgctcaagcgtggcgaccacctccgccatatcgttgccgttgcactgtgtgacctccatgccgaaagcgcgccatttttcatccagcggatcggtattcatgatctctttggtcgcaccggccagctgcagattatttttgtcgttgataataataaggttatccagttggtagtgggcggcgaccagcgcggcctcccagttgctgccctccgccagttcgccatcgccggtgacgacaaatacgcgacgcgggttgttatcgcgtttcgctgccagcgcaatgcctaccgccacgggcagaccatggcccagcgcaccggtattgagctcaatacctggcgttttgtgctttaccgggtgtcctggcagagccgagtcggcgtgttgataggttgccagccagtcaacgggaataaagcctgcttcggccagcacgcagtagtaaccaccgacagcgtgccccttcgactgaatatagatatcgcggtcgtcactctcttttcgcgcaggggagcagttaaggatacgaaaatagagggcggtcagaagttcgacttgtgacagatcggcaccggtgtggccgccagccgggctttccgcatttaagacgatgatgcggcggcggatggcgcgtgctttttgttctaactccttaacggagagtgaaaacggattcataaaacacctcttgaaagtaaattcttgtgtgaataaatattccagcagggtaaagaaacacttcccatcctgactaccttttatcgtcgacaaaacaaggtattaataagtgattgaatatatattcactactgatttattattcacattggtaagatatgccctgcgacggggtttgtccacgatttgtacggcctattttctaaaaaaggagaaaacgatcacatttggatcgtcgggaaaagggcgctgcgcttgttatctattcaatgatgcataaaaataacgagcagaaaacagaggggaatgccatgtcgaagcaggatgaacagcggttgctggtgaagatcgccacgctttactacagcgagaataaaaagcagtccgagatcgcctcgctgctgcatctgtcccagtcttttgtttcacgggcgcttacccgctgtcagaaagaggggctggtgaaaattaccgtggtccagccgacaaacatttttgtcgatctggaaaaggcgattgaggagcgttttggcattcgacaggcgatagtcgtggatgtgggcgagaacgccagttacagtcaggtaaagcatgccatcggcagcgcagcggcgcactatgtcgaaacgcggctgcggccggaagacctcgtggggatctcgtcctggagcagtacgatccgctgcatggtggatgagatgcatccgcagaacattcgcgccgccggggtgattcagctgttgggcggcgtcggtcccaacggcaacgtgcaggctaccattttaacccagcagctggcggctcatttaggctgcccggcttggctgttgccgtcgcagagtattgagcactccgtggaggagcgcagccgtctggtaaacagtccggacgtcgcggcggtggtggcgaaatttgccgaagtggatgtggccatcgtcggtataggtgaactggagccttcgcagctgctgaaaaattccggtaactattataatgaaaccatgctccagctgctggcggcgcgcggcgcggtgggggatatctgcctgcattactataatgcggcgggcaaaccggtactgagccaggatgaggatccggtgatcggtatggagcttgagcaaattcgtcgttgtccgcaggtgattgcgctggctggcggcgtggacaaagagaacgccatccgcggcgcgttgcagggcgactatattgatgtcctgatcaccgacttcccgaccgcgcgcgcgttaattaagggttaagcgggggtgaagactggcgtgcctggcgcgccagcgtcgccagttcgtccgcgctgaggcgagtcatccgcaacacggtttcagtgtccataccgttctctaacatcatcagcgcgatgcggcaggcttcgcgatgttcacccgcttgtaaaccttcgttcaagccttcctgtaaccagcgttgttttccctcttcgcgacctttctgcttcaggtactcggcaatcgtcatcagggtatcctcatattgcggcagacgttcgaccagctggtcgataaagttttccgggtcggcgctattgccatgcagcgacatataggtaaataacgttttgaactgctggtggtcagtgtatcccatcagcaccacctccaccaactgctggaggatatggctgagatcgcgttgacggatgtgtttctggaccagttccagaagcgcgatccgccgatgctgtaatatggcgtcgtcgggaatatcggtcacatcgacgagcggaaaggccccgagataaagctgttttgccggtgagtcaggtgggaactcgtccagccagcacagtgaaaagggatagggagaaatgctgccatgataaaacagcatgggaattaccagcggcagcgctttatggccgcgatcaagatgctgttgcatggccgcgagggcatagcgcaggagtctgaacgccatatggctgtccggggtgctctgatgctcaatgacgacatagatatagccctctcccttgctggtatgcagagagtagagaatatcggaatagctggcgcgcaggttgtcctcaacaaagctcccggattccaggtgcagagtgcttaagtcgcacagttgccgcagcgcgggcggcagatgaatatccagaaaatcgcgtgcggtttcgctgtcgcgcagaaagcgcttaaacagactgtcgtgcggggtcgagtgaggacgttttttcatggcttccttgcctggcagagcagaatggcgggatgctaccactgcttgccgtcgggcaggatttttcgatgagattttgcgaagcgcctcggagaaaggcgcatcgtgagtcaggcccgctccccctgtggcctgagccacaggaggtcttgcggttacttattctccatgaccgctttctgggcgaccaccgccgccttctgctgcatccggttttgcatctgatcgataatgaccgccacaataatcacgatccctttgatgaccatctgccagaactcgcttacccccatcatcaccagcccgtcggcgagaaaaccgatgacaaacgcaccaatcagcgtacccagaatggttccccggccgccggccagcgatgttccgcccagtacgacggcggcgatagcattcatctcaaaagcggtaccgttagccggatggctggccagcagctgtgcggagaccacgatcccggctatggcggcgcaaaagccggacagcgtgtagaccagcactttaatttgcttcactttcacgccggatagctcggcggcacgctcattgtcaccgatcgcataaacatggcggccaaaaggcaaacgccgggcgatataggcgatgatcagcgccaggaggatcatcagccagatggcccacgggatgccaaagagcgcacctgcgccaatttcatcgaaacccgtgttgcccagctgcggattgcccgcgagcccggggaaggtttggccatcagaggtcagcatcgcggctccgcggagcacatacatagtaccgagggtgcagataaacggcgcaacattgtagcgggtaatgatccagccattaacggcgccaatcagcgcgcctatcagcagcaccaggggcacaatgacccacacgcttggaaaaatggcgatgccgaacatcggcaagacgatccctttggtgataagccagccggctatcattccgcagagaccgagcgtagcgccaatcgaaaggtcgataccggcagtgataatgacaaaggtgatccccaacgccagaaaggcgttaatcgcaatgtgtttaatcataatcaccatgctgccagcggataaaaaaccgggcacggtcatcgtgaagaagccgacaatcaggaacagcgcgataaaggtgcgcagttttaataacaacagcaggatattttcacgggagagagaggctccgccgcgcggcgccagtgcgaccgattgtgtcattttcatcttagaacccctgagcgcttgctgaaaccagcgccgactcttcggcctggtcacgaacgatatcggcggtcagtttgccgcctgacatcaccaggatacggtcagagaccgccatgatttcttttaaatcggaggtggagaacaccaccgccattccctgctgcgacaattgcaccatcatgcgaaacacatcccccttggcgccgatgtcgattccgcgcgtaggctcgtcaagaaacagcaccttcggattggttaacagcgaacggccaataaccaccttttgctgattgccgccgctgagcgcctggatctcgactcctggtgatgagaccttgatggatagattgccaattgtgctggcgacgacggcctcttcctctttattggcaatggttaccccgcgctgaagacgacgccacaggctggcaatggtcagattgctggcgactgaagagatcggaaaaatcccggtccgcttacgatcttccggcaccagactcatgcccatgcggatgcgttcggccgtggttaaccgctggggaaccggtttgctgtccagccagatcttgccaaagtagtggcgcgctgtccccagcagacattcaaacagctcggttcgtccggcgcccattagaccgtagatcccaataatttcaccggcatgtgctttaaaactgacgttatccaccaccgtattgcccgcggcattcacgcaggtcaggttctccacttccagcagtggggcaccgaagcggcgattcgggggaagaaaatgacttaccggatcgcttcccagcatttcacggacgatccatggcacatcaatttcactcaccctggcctccgcctggaatttgccgtcacgcagaatggtaatgacgtcgccgatggccatcagctcttccagacggtgtgagatgtagatgatggacaccccctgacgcgtcagctcgcggatgacccgaaacaggatatccacctcggttttgcttaaggcggatgtaggctcatcaaggatcagaatgtccgcattttccgccagcgctttggctatctcaaccaactgctgctgaccgaccttcaggttacccaccagctcccgcggcgagatcggctgatcgagtcgctgcaacagctccgcggcttgtcgttcctgctctgcttcgttaattggcgtaagcccgcgctgtagctcgcgaccaagaaagatattttccgcgacgctaagattttcaaacaggttcagctcctgatggaccataccaatgccgtgggcggcggcctcgcgggtgctggagaaatggacaagcttaccgttgagctccatttcgcccaggctcggctgttgcacaccggcgagaattttcatgagcgttgatttacccgcgccattttcgccgatgatcacgttaactttgccacgccagacgttgtagtcgacgttatccagggccaccgtgccggggaacagcatggaaataccacgggtgcgtaaaatgatctcctctgtgggtgaactggccatcagcgcgcctcctgttttagcgcaagagcggccgcatcctgcaggctgccgttaaccaccgtggccgcaaagagaatatcgacaggtttgcctgcccagctcgcgtccactgtcggcaacgattttattgcctcccggttgtaggcgcgtgaaagctgcgcaaactgcacctggttggtaaagtcttcaaatttaaaaccgctggcatcgcgaatggcgttgcctctcatgacaggacccaactgcacgaccaacggctggcccagtagcgtaagagtgagcttttgctcgcgtgggttgctgacgtcagtcccggtcacctcgctgttcaggcggacaaagacgctctgtggcgtagcgccagacgcctggcgcactttttccagcgcagtcgcgtccagcgcatgttggttcgctgcgtcaatcactcgagattgccaggtttgttgcgcgatctgctgcggggtgagatggtcgaagctgggtttcgcgttcgggtcggcaggcagcactggcttgccattctcatctaagtccaccaccgtgcaggccgtcagcaacagggcggcgcagcccatcagcacggcgccccattgttttaaccgcatcatttccgccttactcgctgaggttgaacatgttgagttttttcgcattgccactatcgatgaggatgcagtccatcaactgcttctcttctttctgggctttcccgttcttcaggaaaaagtccgcctgttccacggccatttgcgcctgcttccagccgggctggagaaccgtggccttaatgttgccctgcttgagtatcgagtcgcgcgtgtagtcgctgccgtcgaagccgacaacaatcacgtcgtttttacccgcggctttcagcgccgcttccgcccccagcgccatggtatcgttgccggaaatcacgccgacgatatccggattcgtctgcagaatggcttccatacgggtaaaggcctccgtctggctccagttcgccgtctgctgggcgaccattttcatttccggatagtcgtccagcacatcgtgataaccctgcgagcggacgctggcgttagtgtctgactgacgacctaatagttcgacatacttgcctttaccgttgaggagactggcaaacttttctgcgccaagctgggcgccctgatagttgttagagacgatctgcgccacggcgacgccggttttattgatctccctgtcgattaaaaatgccggcacacctgccgcttttgctttttccagcgggccgacggtagcatccgcgccagcattatcaaggatgatggctttggctttccgcgcaatagccgtttcaattagttggttttgtttgttgacgtcgtcgtcgtgagaggcgaccagggtgctgtaacccagttcttttgctttcgccgctgcgccgtcagcctcggctttaaagaaaggattatcatgtgaaggggtaatgattgcgatcaggccattatcggcggcgaaaagtgagccagatgcggccatcatggaggcaaacagaacagactttatcagggtagttttcattattatctccgcattgaatatatattcaataatgatttattattcaatgtaaccataaagcggccagtcagaactgtctacggtttgcacaggtaatttcttaaaaagcgaaaaggatcacgcttcgcgagtcgggcaggtacaggtaataacgagatcgtcttttatcagatgattgattttaagggggaaatcagcaagttgcagggagaagctggcggtaaaacgtaaatggatctgctgcgtagtgagtgccacaatccgggcgctgtggaagccgggcaggccggaagcgtgtgaggaccaggccttaaacccactctcttttgccgaaaacgccagcgtcagcgccagcgggaagggcaggccgctgcgcagcagcgccgttttttccgccgggctgataatgctgctctccagctccgcggccagctgtggggtaaaccggcgctcgatatcgacgcccaccggccgatcggcgatcaccgccagcgcgcgctggccgcaatgacttatgctgccgaaccagggcgtgggccacagcggctggcgccgatcgccgatggcgggaagccgtttctcccccacctcgcgcagggcgtatgccgcggcgatgcgtccggccaggtgctccgcctgccgcttgcggctccacccggtcaggctggcgtgatagggcagccagaacagatcttcaggctggaaagtcgccgggtcgaagtcgatctgctggatggtatagccggccagaggcaaaacggtgcgatggtggcgcataggataaggttaccgcggttgcccccgccctttgtccagcaagggcgggggagggagaacccgctatcagaagtgggtgttgacgctcaggtaccaggtgcggcccgattcattgtaggtctcggcgccggcgccgtacatcgtgccggtggcgcccccggtggtctgggcgttgcccgcgcgccagtggcgcttatcgaagacgttatccacgccgccggtcagactgacgtatttggtgacgtcccaggtcgcgctcaggccgaggatgctgtaggggctaacctcgttcttctcgctgccggtgaccggttgacccttgtagttgtacttcttcggctcctgcttgccgtaccaggtgaaggtcgactgcagcgaaacgtcatcgcgaacctgccagctcagggtggagttcagcgtgtattccgggataatcgacagacgatcgccggtctctttgttcttactctgcagcatataggtgatgttgttggtccagttgacggtctcgctcaccggaacgttcaacgtcccctccagaccttccaccaccgctttcggcacgttttcccactggtagagatcggtacctttattgttttgatagaccggggcatagcccgcttcaatcttgttgcggtagtcgttgcggaaccaggtgacgcccgccagccagccgtcgcgtttaaactcgaggccaatctctttgttgatgctggtctcggcttttaagtcgtcattaccctgcagatagcagccgtctttactggcgtagcagccctggcctttactgtagagaatgtagttcgggttggtctgatacaggctcggcgctttataggcgcgggcgatgcccatcttcagcgtgaagtcatcccacaggccctgcgacaggttgagggacgggctccagttattgccgacaatgctgtgatgatcgaaacgcagcgccggagtcagcatggtggtgtcggtcagctccatgttgttctcggcgaacagcgagaagatttccgcctgcgagtacgggctgcggccggtgctgtcgtagcccggaatttcgcctcccgacagcgcctgggtgttggacgcgttatccttcatccgctgttgattccactcgctgcccagcgtcaggttctgattaaccagatagtcgaagggaatgctgacttcgctgtgcagcatcacatccgccagatcgatatccgtgaactggttgctgttaaagatcccctcggtgccgccggccaggccttcgcctttgcgcgagttgcgggtgcgttcgtactgcgcccagttgctggtggtcaccccgttgtcccaggcgccgttccaggtaaccgagtaggtgttgcgatacagacggttggtctctttgccgtagttctcttttaccaggtcgttggagttggtgttctgggtatcgccggcgtagaggttgccctggcggctgtagccggcctcaaactccagcgactgcatcggagcgaattcccagcgcaccagaccatcgatgtttttgtttttcaccccttcgcgcccggccggcagagtatcggcatagatcccggtacgctcggactgatggccctggttgatatcccaggcgtcggcctgcgttttgtcgaggttaccgaacaggcggaagctaaaatcgccgcccagcgggccgctgaggctgaagttagtgcgtttggtggagccttcatccttgtgctccggggcgttcatataggtgttccatgagccgcgccactcatcgccggtttttttggtgatgatattcaccacgccgccggcggcgccgttgccgtagcgggcggcggccgggccgcgaatcacttcgatacgttcgattatctccggcggcacccagctggtatcgccgcgggtgtcgcgctcgccgcgccagccaaggcgcacggagttgcggctggtgaccggcttgccgtcgatcaggatcagggtattttccgggcccatgccgcggatatcaatctggcggttgttgccgcgctggccgctggtggagttgccggtcaggttgactcccggcatggtgcgaatgatctccgagacgtcgcgcgccggggggcgtttgcggatctcatcggcggtgatggtggagacgcccggcgcctgcaggttctgctcggcggcggtgaccaccatggtctcttcagcggcgctgtttttatcgtcggtggcggtttccgctgcgcttaacggaaaagcaaccccgtaaattcccagattgaccagcaaggccagggatttgatcctgttattcattgttattcctgctttttgtcgccacgttccccaaacgccccttcccaccgggaggggaggcggcataaatgttgccaaaagcgggcaaaggcactccgtcgctggctgaataggcccgatttgacatgttctgatgaaagacgcgcttcccacggcgcgctaatacgctattgcaaatgcaaatagttatcaataatattatcaataaataatgacaattaattaaaaaagtcacgctatacatagggttaattacagaatgttaaggacaggaagcgaggagtggtggcgaaccctgcgggggccgcagtgccgcgcagtggatgacaccatcgaggtaacgttctggtggcgggacccggcgggggatgaaacctgctctccccatcgtcgggtatggctctatatcaccggcgtgaccgaccaccatcagaatgcgcgtccgcaatcgctgcaacgtctccccgggaccgacgcctggttctggcgcactacgctgtcgccgacctggcgcggcagctactgttttattccctccgaccgtgacgatgatttttcccctgaggtgttcagcgctgatgcgcccgaccgcgcgctgctacgcgaaggctggcgcaaactgctgccgcgggcgatagccgatccgctgaacccgcacagctggcggggcggacgcggccatggcgtgtccgccctggagatgccgcaggcccccgcgcagcccggctgggacccgcttaatgaggcgcatcctgccgcccgttgccttgagtggcgcagcgcgcgtctgggcaaccatcgccgggtctggatctacaccaccggcgaggccgtcgacccgcaaacgcggccgctggcgatcctgctcgacggccagttctgggccgagagcatgccggtgtggtcgccgctggccgccctgacccgcgagggaagactgccaccggcggtctacctgctgatcgacgcgatcgacaaccagcgccgcggggttgagctgccctgtcaccgcgatttctggctggcggtgcaggaggagctcctgccgctggtccacggctatgccccgttcagcgaccgcccggatcggacggtggtggccgggcaaagcttcggcggtctggcggcgatgttcgccgctctcaactggccgcagcgctttggctgcgtgctcagccagtcaggctcctactggtggccgcaccgcgatggccgcgggatgggctttatcggcgaacagcttcgccagggtgaggtgtccgcggccgggctgcgcgtctggctggaagcgggccaacgcgaaccgatcatttttcgcgcgaaccaggcgctactggcgcaactcaccacaacacagcagacgattttctggcgtcaggttgacggcgggcatgatgcgctttgctggcgcggcgggctgacggcagggcttatccagctctggcagcctctgctgtcgcacccttagcatcgcgttttacgacaggagtttgatatgcaattcagtaaccccttcgacaatccgcaagggcagttttacattctgcgcaatgatcaacagcagtacagcctgtggccggcgcactgcgacctgcctgccggctggacggtggtgtgccccccgcagtcggccgaggcctgcaacgcctggctggcggccaactggtcgacactgacccccgcccatcatgcgtcataaggagctgacaatgaccactcgtttaccgctggttgccgcgcagccggggatctggatggccgagcgcctctccactctgccaggcgcctggagcgtggcccactatgttgaactacgcggcgccctcgacccgacgctgctgggaaaagcgattgtcgccggtctgcagcaggcggacaccctcagcctgcgctttgaggaagaggagggggaagtctggcagtggctggcggccgaccgcacctttggcgaaccgtcgatcattgacctgcggacggcgccggatccgcatcgcgccgccacggagcggatgcaggcggatctggcgcaggatctgcgcgtcgacggcggcaacccgctggtgtgccatcaactgctgcgcgtcggcgacgactgctggtactggtatcagcgttatcaccacttgctggtggatggcttcagcttcccggcgataacccggcagatcgccgccatttatcgcgcctggcagcggggggaagctactcctgagtcgcctttcacccccttcgccgaggtggtggacgagtaccagcgctacgccggcagcgaggcctggcagcgggataaagctttctggcaggcccagcgccaggcgttaccggcgcctgcctcactctctgccgcgccgctgggcgggcgcgccgccgggagcgatatctggcggatgaagctagagatgaacgccgacggcttccgccgcctggccagccatgcgccgcagtgtcagcccgctgacctggcgctggcgctcaccacgctgtggctgggccgcctgtgcaaccggatggactacgcggcgggctttatctttatgcgccggatgggttcagccgcgctgacctcgacggggccggtgctcaatgtcctgcctctggcggtgcatattgacgcccgggagacgctggcggacctggcgatgcgcctcgccggtcagctgaaaaagatgcgccgccatcagcgctatgacgccgagcagatcgtccgcgacagcggcaaagcggcaggggacgaaccgctgttcggcccggtgctgaacgtcaaagtctttgattaccagctggatatcgatggtgtgcaggcagtgacccacaccctcgccaccggcccggtcaacgatctcgagctggcgctgttcccggatgagaccggcgggctgtcgctggagatcctcgccaacaaggcccggtacgacgaagccgagctccgtcgccacatggcgcgactgaccgcgctgctggcgcagttcgccgccgatccggcgctgcgctgcggcgaagcagagatgctctccgccgacgagctggcccggctggcggcggtcaacgataccgttgtgccgctgcctgccaccaccctcagcgcgctggtggccgaccaggcgcggaagaccccggatgcgccggcgctggcggacgcccgctggcagttcagctatcgcgagatgcgtcagcaggtggtggcgctcgcgcagctgctgcgtcagcgcggcgtgaagcctggggacagcgtggcggtggccctgccgcgctcggtgttcctgaccctggcgctgcacggcattgtcgaagcgggggccgcctggctgccgctggacaccggctacccggacgaccgcctgcggatgatgctggaagacgcccggccgtcgctgctgatcgccacggaggatcaactggcccgcttcagcgatatccccgggctggaaagcctctgctaccagcagccgctggccgccggggatgaggcgccgctggcgctgtcaaaaccagaccataccgcctacatcatctttacctccggctccaccgggcggccgaaaggggtgatggtcggccagaccgccatcgtcaaccgcctgctgtggatgcaggatcgctatccgttatctgccgacgacgtggtggcgcagaaaacgccgtgcagtttcgacgtgtcggtgtgggagttctggtggccgtttatcgccggcgcgcagctggtgatggccgagccggaggcgcaccgcgacccgcaggcgatgcagcagttcttcgcccgctacggtgtgaccaccacccactttgtgccgtcgatgctggcggcgtttgtcgcctcgctggatgccgacagcgtggccgcctgccgcacgctgcggcgggtattctgcagcggcgaagcgctgccgacggaattgtgccgcgagtgggagcgcttaaccggcgcgccgctgcataatctgtacggcccgacggaggcggcggtggacgtcagctggtacccggcctgcggatctgagctggcggcggtgaccggcagcagcgtgccgattggctggccggtgtggaacaccgggctgcgcattctcgatgccgcgatgcgcccggtgccgccgggggtggcgggggatctttatctcaccggcatccagctggcgcagggctatctggggcgcccggatctcaccgccagccgctttatcgccgacccgtttgcccccggcgagcggatgtatcgcaccggcgacgtagcgcgctggctgacgaacggcgcggtggagtaccttggccgcagcgacgatcagctgaagatccgcgggcagcgcatcgagcttggcgagattgatcgggtgatgttggccctgccggacgtggggcaggcggtgagtcacgcctgcgtcttcaaccaggcggcggcgaccggcggtgatgcgcgacagctggtgggctatctggtctctgactccggcctgccgctggataccgcggcgctgaaagcgcggctggcggaacagctgccgccgcatatggtgccggtggtgctgatgcagctcgctgagctgccgctgagcgccaacggcaaactggaccgcaaagcgctgccgctgccgaccctcggcggcgagcgcagcggccggccgccggagcccggcatggaaactcttgtcgccgccgccttcagccagctgctgggctgcgaggtgaacgatatcgacgccgatttcttcgcccttggcggtcattcgctgctggcgatgcgcctggcggcacagctcagccgccagctggcgcggcaggtgaccccggggcaggtgatggtggcctcgacggtgggcaaactgagcgcgctgctggccgccgatctcagcgatgagcaggcccagcgcctggggctggatacgcttctgccgctgcgcgagagcgacggcccgacgctgttctgcttccatcccgcctccggcttcgcctggcagttcagcgtgctggcgcgctatctcagcccgcgctggtcgattaccggtattcagtcgccgcgcccgcaggggccgatggctagcgccgccagcctcgacgaggtgtgcgagcatcatctgcgcacgctgctggcgcagcagccgcacggcccttattacctgttcgggtattcgctgggcggcaccttagcccaggggattgccgcccgcttgcgccagcgcggcgaagcggtggccttcctcggcctgctggatacctggccgccggagacgcaaaactgggcagagaaagaggccaacgggctggatcccgaggtactggcggagatcgaccgcgagcgcgaagcgttcctcgccacccagcaggggcaagcctccggcgagctgttcagcgccatcgaaggcaactatgccgatgcggtgcggctgttaaccaccgcgcatagcgcgaagtttgacggcaaggcgacgctgttcgtggcggagaagacgcggcaggaggggatggatccgcaggtcgtatggggcccgtgggtgggggaactggaggtgttcagccagaactgcgcccacgtcgatatcatctccccgcaggcctttgaggccatcggtccggtggtcagggagattctggggtaacggttgagttcgggctacagcaggtagcccggctcagcgtagcgcaagccggggaaagaggagattaccggcggcccagcgggaccaccagcggcgtatgcgccaccggatcttcaatgatcgtgcagcgcagaccgtaaatccgttcaatcagatcggcggtgacgatctccttcggcgccccctcggcgacgatcctgccgtcgcgcagggcgatcaggtgggtggcgtagcggcaggcctggttaagatcgtgcagcaccgccgccagggtatagcccttctcgcgattcagctcactcaacagttccagcaggtcgatctgatggctgatgtccagccaggtggtcggctcatccagcagcataatcgccgtttcctgggccagcaccatcgcaatccacgcccgctgccgctggccgccggaaagcgtgtcgacgctctgcagcgccagatcgctgatcccggtcgctcgcatcgccttgttcaccgcctcttcatcttctttgcgccagcgggtaaacagcggctggtgcggatagcgcccgcgggccaccagctcctgcaccgtgatatcgccaggggtggtggcattctgcgccagcagcccgatgcggcgggcaacctctttactggcgtactgctggatctgcgcgccgtcgagccagacgtggccgctggcgggcgtcatcaggcgactgagggtgcgcaatagcgtcgacttgccgcagccgttggggccgataatggcggtgaagtgaccgtcagggatggtcacgttcagcgactcggcgatggtcttgttcccgtaggccagggttaactgctcgccgcgcaaacgggaggggacagcactcattttttgcgggactcctgaatcaacaatgcaataaggtaaataccgccgaggctgacggttaacacgccaaccggcagctgccacggcataaacagccgttgggcgccgtaatcggccagcgccagcagcagcgcgccgcacagggccgactgggtcagtccccagcgggccgtgccgctcaggcggcgggcgatatgcggcgccaccagcgcgataaatgagatcggcccggccagcgccgtcgaggcggcggtgagcaccaccgccaccagcatcagcagcaggcgcgaacgctcgacctgcacccccagcgcgcaggcggtatcgtcgcccatctccagcagccgcatccggcgaaccagcagggcgctgcccaccagcatcaacaggatcagcggcgccgacggccaggttttaccccaggtcaggccgttaagcgatccggcgttccacaggcccgcagaaagggcggtctccagcgaggcgcgcagcagcagccaggtgttgaatgccaccagcatggcgcgcacgccgatgccgataatgatcaggcggaaggtttcgatcccgttgcgccaggccagcagccagaccaccagcgaggtcagcaccccgccggccatcgccgccagggcgatcgccgtcaggttctggccgaagaggaccattgccaccagcacgccgctccaggcgccggtgttaaagcccatcacgtccgggctgccgagcgggttacgggtcagcgactggaaaatggcgccgctgacgccgagcgcggcgccgatgagcagcgccattaacacccgcggcagccgccattcgttcaccaccatcgcgacgttgcgcggcgcatcgccgaacagcgccgagaacacctggtcaatcgtcaggggcaccgggccttgcgccagcccgagcagggaaatcagcaggctggcggccattagcagcagacagctggctatcaggcggcgggacggggcaatcacaggccacctccccgcggctggcggcgcaccagccagatcagcaccggcgcgccgagaaaggcgctcaccaccgatacccgcagttcgccgggcaccagcaggcggccaatcacgtcggcaaacagcagcagggccggggtggcgagcagggtgaccggcagcgaccagcgatgatcggcccccaccagccagcgcgccatatgcggcatcatcaggccgataaaggcgatggggccgacgacggcggtggcgctgccgcacaggacggtgatgacgatcaggccgatcagctgggtgcgggcgacgcggctgccgagggcggtggcggtatcgttgcccaggctcaggctgttcagcgcccggctcagcagcagagcggcgatccccgccaccactaccggcagcaggacaattttcagcgtttgcagggtgcggatatccagcgaaccggcctgccagaagcgtagctgatcgtagacgtccgggttgagcagggcgatgccgttggacagcccctcgagtaccgccgcaagggcgaccccggcgagagtgaggcgcaccgggctcagctgaccgccgccctggctgccggtaaaggctaccagcagcgaggcgcagagcgcgccgcagaatgccagcagcagctgctcctgcggggaagtgatcccaaacagcgccgcgccgaggacgatggcgaagctggcgccggagttgacccccagcaggccggggtcggccagcgggttgcgggtgagcgtctgcatcagcgcgccggcgaggccgagggcgacgccggccagcagaccggccagagtgcgcggcaggcgcgcgtccagcacgatagtgcaatcagcgctttgacaggttccgctgaaggcggtgaataccgtgccgatcggcaacgatttggcgccgatggtcaggctaagcgcggcggctaaggcgagtaatagcaacaatccgggcacggcgacagagcgtaccgcggtcgtagaaaacgacataactgacatccctgatatgataatgatagtaattatcgttatcgattttattcagctatggtagcatgacccacagtaaaaagggtattaaaaataacgacaaggcgctgtaatgaaccgacaatcctggctgctcaatctcagcctgctgaaaactcacccggcgtttcgcgccgtttttatcgctcgctttatctctattctgtcgcttggcctgctgggcgtggccatcccggtgcagatccagatgatgacccattcgacctggcaggtcgggctgtcggtgacgctgaccggggcgtcgatgtttgttggtctgatggtggggggcgtgctggctgaccgctatgaacgtaaacgcctgatcctgctggcgcgcggcacctgcggcgtgggctttgtcggcctgtgtctgaacgccctgttgccggagccgtcgctggcggcgatctacctgctggggatctgggacgggttcttcgcctcgttgggggtgaccgcgctgctggcggcgaccccggcgctggtgggacgggaaaacctgatgcaggccggggccatcactatgttgacggtgcgcctgggctcggtgatttcgccgatgatcggcggcctgctgctggccaccggcggcgtggcgtggaacttcggcctggcggcggcggggacctttatcaccaccttaaccctgctgcgtctgccgcagctgccgccgcctccgcagccgcgcgagcatccgctgcgctccctgctggcggggctgaccttcctctgccggagcccgcttatcggcgggattgcgctgcttggcggtctgctgaccatggccagcgcggtgcgggtgctctatccggcgctggccggtagctggcagatgtcggccggacagattggcctgctgtacgccgctattccgctcggtgcggcgctgggggcgttgaccagcggccagctggcccagacggtgcggccgggcgcgctgatgctggcgaccacggtgggatcgtttgtcgccattgcgctgttcagcctgatgccgcactgggcattgggcgcgctgtgcctggcgctgtttggctggctgagcgctattagctcgctgctgcagtacaccctgattcagacccagacgccggaacatatgctcgggcggattaacggtctgtggaccgcgcaaaacgtcaccggcgacgccatcggcgcggcgctgctcggcggcttaggggcggtaatgacgccggcggcatccgccagcgccagcggctgggcgctggcgcttgtcggtgtgctgctggttgggctgctacgcgagctgcgccgtttccagcgcccggaaattgtcaacgaaagttaagtcggatgcgcttgcccggtggcggctacgccttaccgggcctggggtacggcaggccggtacaagctcagtaggccgggcaagcgcagcgccgcccggcaaagagttcaggttgcgtgccccggcctgatgcccggtggcggctgcgccttaccgggcctacggtctggactgggggacgctggcattgtaggccgggcaagcgcagcgccgcccggcaagatgttcaggctgcgtgcccggcctgatgcccggtggcggctgcgccttaccgggcctggggtacggcaggccggtgcaagctcagcaggccgggcaagcgccgcgccgcccggcaaggtgtgcaggccgggttcccggcctgatggcgcagcccgcgttagccgaacaggctggagagacgctggagcaccagaagagcgctgtagtagtcaaggcggaaggtctcggtgcccagcgggtagacgcgtttgcctgcgaccgccgggagatgcgccagcagcgggttggcgtagatggcatccgcatctttctggtcgccggcgaacaggaacaggctctggccgttcagaccggccgcgaggttctccccgcccagctgcacgatatcgtggcgtttaccctggctatggctggcgggcaggccgcccggcagcgtcgccaggctaaagcccagctgttcgagcatctgcccctgagccgattccggcgtccagatattggcgctgtgcgcggcggcggtatagaccagggcggtcaccggctgcggcggcagtttcattttttcttttaacgaaacgagctgtttattgaagtcggcaatgcgcgcgctggcctgttgttcatgaccggtgatctgccccagctgggtgagcagggtttgccagcttttatcgtcatagttgatgaccagcgtcggggcgatggttttaagctgatcgtacagcggcagtgcggagtcgccaccggtcgcgctcaccaggatcagatccggcatctgggcggccaccgcttcggcgcttggttcgccgatgtacagccgcgccagcttgcgggctttggcaacctcgctccactggcgcagaaagccctggctatcggcgacgcggttgttcggcgtggtcgcgccgctggcgaccaccggagcgtcaatcgccagcagcgaaccggtaagcgtcacgctggtggagacaatgcgcagcggctgactcggcagggtatgcgtcccgtagctgtcggtgacctggcgcggccagtccgccgcctgggctgaggtaattcctaaaagcaacagcatgccggtcagcgcaccgcggcggcagaaagaaaagaagttcacgtcatcgcatcctgatttgaaaggtgataaatgcgtctcattttcaactttgtgtcagcaggatgcaagccaaagtggcggcgccatgacgtaacgcggttgacatggcgggcaataccttttaggttagccaaccaaaatataaatgataattattcttaatatctttatcgtttttggaggatgatatggaaacgtcactggctgaggatgtaaagaaaccgacccggaccctgtcgccggacagcttcttctttatgtcgccgtaccgcagttttaccacttcaggctgcttccgtcgcttctcacagcccgccgttggcggagatgcgctgaacggcgagttccagcagcagatggcggccgcctttgccgaggcccgggcggcggggatccgcaagccggtgatggtcggggctatcccgttcgacacctgtcagccttccgagctctatatccccgagcgctgggaagcgttctctcgcccggaaaagcagcgttccgcccgctatgccgcgccgctggaggcgatggaggtggtggagcgtcgggagatcccggagcaggacgcgtttttagccatggtggaacgcgccgccgcgctgaccgccaccccggaagtcgacaaagtggtgctatcaaggcttatcgatattaccacccgcgaccgcgtcgacagcggcgcgctgatggagcgactgatcgcccagaaccccgccagctttaacttccacgtgccgctctccgacggcggcgtgctgctgggcgccagcccggagctgctgctgcgtaaagaaggacagcacttcagctctctgccgctggccggctccgcccgtcgccagccggacgatgtgctggaccgggaagcaggcaacaggctgttggcctccggcaaagatcgccacgagcacgagctggtgacccaggcgatgaagagcgtgctgggcccgcgcagcagtcagctgtcgctaccggagtcgccgcagctgattaccaccccgacgctctggcatctggcgacgccgatcgcaggcaccgcgctggcggaagaaaacgccatgtcgctggcctgtctgctgcacccgacgccggcgctgagcggtttcccgcatcaggcggcgaagcgcctgattgccgaactggaacccttcgatcgccagctgttcggcggcatcgtcggctggtgcgatgacgaaggcaacggcgagtgggtggtgactatccgctgcgcgcgtctacagcagcgtacgctgcgcctgtttgccggcgcgggcattgttccggcctcctcgccgctgggcgaatggcgcgaaaccggcgtcaaactgaccaccatgcttaacgtatttggcttgaactaagaggcaaggatgattgcatttacccgttggccggaagagtttgcggcccgctatcgtcaaaaaggctactggcaggatctgccgttaaccaatctgatcacccgtcacgcggacaatgacgccgtggcgattatcgatggcgagcggcagattagctaccgccagtttaaccagctggtggacaacctcgcctgctcgctgcagcgccagggactgaagcgcggggagaccgcgctggtgcagttgggcaatgtcgccgagttttacatgaccttctttgcgctgctgcgcatcggcgtcgcgccagtgaacgctttgttcagccaccagcgcagcgaacttaatgcctacgccgcgcagattaaaccggcgctgctgattgccgatcgcgagcacgctctgtttgctgacgatagctttctccacgcgtttatcgcggaacatccttccctgcgcgtcgcactgttgcgtaacgacggcggcgagcgcgatctggcgacggagattaaccgcccggcggataactttatcgccaatccaacccctgccgacgaagtggcctttttccagctctccggcggcagcaccgggacgccgaagcttatcccacgcacccataacgattacgactacagtatccgccgcagcaacgagatctgtgggattaacgctgaaacgcgctacctcaacgcgctgccggcggcgcataactatgcgatgagttccccgggttcgctcggcgtcttcctcgccggcgggcgggtgatcctcgccgccgacccgagcgccacgctctgtttcccgctgattgaacaacatcagatcaacgttgcctcgctggtgccgccggcggtcagcctgtggctgcaggcgattcacgaatggggcagcaacgcccagctgcaatcgctgcagctgttgcaggtcggcggcgcgcgcctgtcagcgaccctcgccgcgcgcattccggcggaaatcggctgccagctgcagcaggtgttcggcatggcggaggggctggtgaattacacccgccttaacgatagcccggagcggatcatcaatacccagggctgtccgatgtgcccggacgatgaagtgtgggtggcggatgccgacggcaacccgctgccgcgcggcgaagtgggccgtctgatgacccgcggcccttataccttccgcggctattacaacagtccgcaacataacgctgaagcctttgatgccgatggattttactgctccggtgatctgatttcgatcgatgaagatggctatatcaccgtccagggccgggaaaaagatcagatcaaccgcggcggcgagaagatcgccgctgaagagatcgaaaacctgctgctgcgccatgaggcggtgatccacgccgcgctggtcagcatcgaagacaatctgctgggcgagaaaagctgcgcttatctggtggtgacctcgccgctgcgcgccgtcgccgtgcgccgcttcctgcgcgagcagggggtggcggaatttaaactgccggaccgcgtggagtgcgttgccgcgctgccgctgacgccggtgggcaaagtcgataaaaaacaattacgtcagtggctggccgaaggcaagctgggctgaaggagaacagagaatggcaatccctaaattacaggcttatgcgctgccggaagccagcgatattccggcgaacaaagttaactgggcctttgagccgtcgcgcgccgcgctgctgatccacgacatgcaggagtatttcctcaacttctggggcgaaaacagcgcgatgatggagaaagtggtggctaatatcgccgccctgcgcgacttctgcaaacagaacggcattccggtgtactacaccgcccagccgaaagagcagagcgatgaagaccgcgccctgctgaatgatatgtgggggccgggtctgacccgctcgccggagcagcagcaggtgattgccgcgctggcgccggatgaagacgataccgtgctggtgaaatggcgctacagcgcgtttcatcgctcgccgctggaggagatgctgaaagagaccggtcgcgaccagctgatcatcaccggcgtttacgcccatatcggctgcatgaccaccgccaccgatgctttcatgcgcgatatcaaaccgttctttgtcgccgacgcgctggcagatttcagccgtgaagagcacctgatggcgctgaaatacgtcgctggccgctccggccgcgtggtgatgaccgaagagctgctaccgctcccagcctccaaagcggcgctgcgcgcgctaattctgccgctgctcgacgaatccgatgaaccgctggatgatgaaaacctgatcgactacggtctggattcggtgcggatgatggccctggccgcccgctggcgcaaagtgcacggcgatatcgacttcgtgatgctggcgaaaaacccgaccatcgacgcctggtgggcgctgctcacccgcgaggtgcaataatggcggcgctggattttcacggccagaccgtgtgggtgaccggcgcaggtaaagggattggctatgccaccgcgctggctttcgtcgaggccggggccaacgtcaccgggttcgacctcgcctttgacggcgaaagctacccgtttgccaccgaaacgctggacgtcgccgatgccgaccaggtacgcgaggcatgcagccggctgttggcgaacaccgagcgtttagatgtgctggtgaacgccgccgggatcctgcgcatgggcgctaccgaccagctgagcgcggaagactggcagcagaccttcgcggtcaacgtcggcggggcgttcaacctgtttcagcagacgatggcccagttccgccgtcagcggggcggggcgatcgtcaccgtcgcctccgatgctgcgcacacgccgcgcatcggcatgagcgcctatggcgcctcgaaggcggcgctgaaaagcctggcgctgaccgtcggccttgagctggcgggcagcggggtgcgctgtaatctggtgtcgccgggctccaccgataccgatatgcagcgcaccctgtgggtcagcgacgatgcagagcagcagcggatccgcggcttcggcgagcagtttaagctcggcatcccgctgggtaaaatcgcccgcccgcaggagatcgccaataccattctgttcctcgcctcttctcacgccagccatatcaccctgcaggatatcgtggttgatggcggctcgacgctgggggcgtaaatggcctggaagcgagagcttacgctggcggcgctgaacgccagcagcgaaaataccatggtggcgcatcttggcatcatctacacccgactggaagaggggctgctggaggcggagatgccggtggatgcgcgcacccatcagccgtttggcctgctgcacggcggcgcctcggcggcgctggcggagacgctgggctcgatggccggttggctgatgaccgaagaggggcagtgcgtcgtcgggactgagcttaacgccagccatcaccgggccgtctccagcgggaaagtgcgcggcgagtgccgtccgctgcatcttggtcgccagagccagagctgggagattgtggtgtatgacgagaaggggcggcgctgttgcacctgtcgtctgggcaccgcggtgctgggctaagaagccgctgtttccccggcttgcgctacgcttagcctggctacggtttctgggccaggaagccgctatttccccggcttgcgctacgcttagccgggctacgtatcggcgcaatggggtagcccggataaggcgcagcgcgccgccatccgggagtgtccctgatcgcgctgcgcttagactggctacggatctgtaggtcgggtaaggcgttagccgccacccgacaaaaaaaacggcaccgttcacggtaaccctttcattcatttacctgccttaagtgatctcgctagcaatgtgagacaaatctctgtgggtgtacggcatctgcgatgtttcggtgttgttaaattctgcgttgtgatctagaaacaaaatgtaacatcctgattaccctaccggtggaccacaacaatgaataattcagggaaataccttatctgggcgctgctctccgtcatcggagccttcgccctcggctatatcgctttaaaccggggtgagcagataaacgcgctgtggattgtcgtcgccgcggtctgcgtttatttgatcgcgtatcgtttctacggcctgtatatcgctaaaaccgtgcttggcgttgacccgacgcggatgacgcccgcggtgcggcataacgatggcctcgactacgttccaaccgacaaaaaagtgctgttcggtcaccattttgccgccattgccggcgcggggccgctggtgggcccggtgctcgccgcgcagatgggctacctgccggggatgatctggatcctcgccggcgtggtgctggctggggcggtacaggactttatggtgctgtttgtttcgacccgccgcgatggccgttcgcttggcgaactggttaaagaggagatgggaccgaccgctggcgtcctggcgctggtggcctgctttatgatcatggtgatcatcctcgcggtcctggcgatgattgtggtgaaagcgctgacccacagtccgtgggggacatacaccgtcgcctttaccattccgctggcgatctttatgggcatctacatccgctatctgcgtccgggacgcatcggcgaggtgtcggtgataggcctggtgatgctggtgttcgccatcatctccggcggctgggtggcggaaagcccgacctgggcgccgtggtttgattacaccggcgtacagctgacctggatactggtgggctacggatttgtggctgcggtactgccggtctggctgctgctggccccgcgcgattatctctccaccttcctgaaaatcggcaccatcgtggggctggcgattggcatcctgattatgcgcccgaccatgacgatgccggcgctgaccaagttcgtcgatggtaccggcccggtatggaccggcaacctgttcccgttcctgtttatcaccatcgcctgcggcgcggtctccggcttccatgcgctgatctcctccggcaccacgccgaaaatgttggccaacgaaagccaggcctgctttatcggctacggcggcatgttgatggaatccttcgtcgctattatggcgctggtggcggcctgtattatcgatccgggcgtctacttcgcgatgaacagcccgatggcggtgctggcgccggcgggtaccaccgatgtggtcgcctcggcagcgcaggtggtgagcggctggggctttagcattacgcctgatacgctgcatcaaatcgccagcgaggtcggcgaacagtcgattatctcccgcgccggcggcgcgccaacgctggcggtggggatggcctacatcctgcacggctcgctgggcggactgatggatgtctcgttctggtaccacttcgccattctgtttgaggcgctgtttatcctgacggcggttgacgccggcacccgcgcggcgcgctttatgctgcaggatctgctgggcgtgattagcccggggctgaaaaaaaccagctcgctaccggccaacctgctggcgaccgcgctgtgcgtcctggcttggggctacttcctgcatcagggggtggtcgatccgctgggcgggattaacaccctatggccgctgttcggtattgccaaccagatgctggcggggatggcgctgatgctctgcgcggtggtcctgttcaagatgaaacgccagcgctatgcgtgggtggcgctgctgccgaccagctggctgctgatctgtacgttgaccgccggctggcagaagtcgtttagcccggacaccaaagtcggtttcctggccatcgccaataaattccaggcgatgatcgacagcggcaacattccgccgcaatataccgaatcacagctggcgcagctggtgtttaacaaccgtctcgatgccgggctgaccatcttctttatgattgtggtggtggtgctggcgctattctcgattaaaaccgcgctggcggcgctgaaagaggataaaccgacggcgaaagagacgccgtatgagccaatgcctgaaaacctggacgcgattgagacccaggcgaaaggggcgcattaaccggtgtgccgggtggcggcttcgccttacccggcctacatttccgatcctccctctccctttgggagaggctcggggtgagggatacaaaagagaaatgacttatgtttgacaccctctccaaagcaggaaaatatttaggccaggccgccaaaatgatgatcggcgtgccggattacgataactacgtcgagcacatgcgaataacccacccggatcagacgccgatgacttatgaagagttctttcgcgaacgccaggacgcgcgctacggcggcaagggcggggcgaagtgctgttaaccctctttcggcagatagaggctgatctgctcctgagtacagccgtaaatcgccgccagcttctcgcgggtgcgcttttgcggacgggagtccagcgcttccagctgtgacaccgcggactggctgatgccaagcttttcggctacctcctgctgggacatcccgcgcaggatgcgccacgcggcctgcaggctgacgttttctttatgcatcacgtcgcatacttcgcccggcagcatgacgtcatcatagatatctgattcataaggaatatcttcccagtcgctttcatcctcgtcgtcgtactccagcagagccaggcgcatacgaaagtaatcgctgtaaggaatgacgacatactggtcttttccttcttcatccttgatgtactgaatagtcatattcggtatgttcctcatgaaggtaggtggtggtggttcggcgtttaaccgccacgacgtagcaggtatcgcccggcggatccccaaaggtgtagatgactctgtaatcacctaatcgcagccggtagtggttttcgggagaggacaattttttgatatccgagataggtgaagctttatcatccatcttctccagcctggatttaatgcggctcttataccgagtatcgattttagaaaattgcttatctgccgtttttgaccagacaattttcatccgtacctccactgtacgcccacacaaaatataaggaaataataagactattagataaattccgaattccttatggggtactgtagagcggagaaaaaacgcaggtaagaggcaaaacgcaacccgtcgaggcggcgcggaaaggcctctgccgggcgacagaggcttgcagaaaatgtgcgatcaggcgttcaatccgccatccacgtccagccccgtaccggagatctgcccggcggccgggctggcgaggaaggtgaccgccgcggcgatgtcttccggctggccgtagtggccgaccgcaatcatctggcgctgggcttccgcctgttctccgtcttccgggttcatatcgctgttggtcggccctggatggacaaggttaacggtgatcccgcgagggcctaaatcacgcgccaggccacgggtcagggcgttgagggcggacttggtcatggcgtacaccgcgatgcccggcatggccacgcggttagccagacagctgccgatgttgatgattcgtccgccatcggccatatgcaccaacgcttcctgggtggcgatgaccaccccacggatattgacgttgataagcgcgtcaatgtccgccagcgtcatggattccagtggaccgccgcgggctattccggcgttgttgaccagaatgtccagcccgccgagggaccgggccgcatgggtgacggcatcctgaatcgcctgcgcgctggcgctgtcggcctgtaccgcttcgccgtaccgacccagggcctttatttcatcggcgaccgcatgggctttatcggccgatttttcatacgtaataaccacatcggcgccggcgcgcgccagcgacagcgcgatggcgcgacccaacccacggctggcgccggtaaccagcgccttcttacctgttaaatcgatctgcatgatgacctcgttgcgagagtggtgagcatcatcattaggtatagacggtcggggtgattaacggctgaagtattccaccttctcaaacgccgcgcgcagaacctcaggggttaacgtcaccggtaaatagtgaatcgactcgcccgggcgcagggtatgggcaatgacccggtccagctctgcgcggttattgatatcgacttccagcgccgccagggtggtcggcaggttaaagcgctgatacgcctgcactaactgcgccagcacatcgtcctgaccaagcagggcgctctgtaccagaatgccgtaggccactttggtaccgtggagaaatttatccgtctgcggcagcaccgtcagtccgttgtgcaccgcatgggcggcggcgacccgggtgtaacgttcccccagcccgccaaccatcccgccgccggcgataatcgcctccaccacatcgcgaaacgcctgggtcagatcgccgcggcgctggtccgccagcgccgtttcgctgctggccagcagcacgtcgcggatcgccagcgcgccgttaatccccagccgcacggtgagcggcagcgccttcggctgcggcgccagcaccacggcctcataccatttggctaaggtgtcgccaatgcccgccagcaggtactccgccggggcgttgagaatgatgcgcggttcgaccagcactaggaagttggcgtcatcgaagatctcaaaattcagggcctgtccggcgtcgctataccacaccgacagcggcgtccacgccgcgcaggtggcggcgatagtcgggatggccaccagcggtacccccaggcggcgggcgagcactttcgcgctgtcgagcagcgcgccgccgccgacgccaatcactaccgcccgatcgtcaccggaggcctgcaccagccccgccacgtcgcgttcgctgcagtggccggtaaagcggatctttttcgcctccggcaggtggaaggccgccggcagaaaaggttcggcgccggccagagcgcgctcgccatagacccacaccgctcgcgagagctggtcggcgttaaaaaaatcgctcagccgctcaaggctgccaggatgggagaaatagttggccgggccgggcacgacgcggatatcgctgttactcatggaagctgtccttatgggtgttgggctaacctgatgttatgtctggacatccagatggctaatattatttcgttgtatcttatgctttttacgcagttgtcagccagcggcggctatgaaaaattcgttaaatcagaagattaattgccgcacgggagcagtgatgagcgcgaatcgccttgagatgcataacattagcctggccttctccggctttcaggcgctgaacaaggtggactttaccctccatggcgggtcggtgcatgccctgaccggggccaacggcgcgggtaagtcgacgctgatggccgtgctgtgcggcacccacgcccactatgagggcgaagtgacgatcaacaaccagccggtcatcattcgttcgccgcgggatgctaaacagctggggatccacctggtgcagcaggaggtggacgtggcgctggtgccgggcctgagcattgcggaaaacattatgctggacaggctggcggagccgggcatgaccttccgctggtcgcgggttcggcagctggcgcgcgaggcgctggcgcagctggatgtggcgctggacgtcaggcgctccattgacagctgcacgctcgccgaaaaacagcaaatcctgttggcccgcgccctgtcgcaccattgccgctttttgatcctcgatgaacccaccgcgccgttggatcagcatgaaagtgagcgtctgtttgcggtagtacgccgtctgcagcatcaggggatcggggtggtgtttatttcgcatcgtatccatgagctgaaggcgatctgcgacaccctgacggtgctgcgcgacgggcggctgattgagagcggcccgatggggccgctgagcggcgaacagatcgtcgaaaagatgctgggccacgagctgagcgatatcttcccgccgccgcgcccgccgcacggcgaagaggtgctgttgcaggttgacggtctgcatgatgaggcgttgctgcaggatatttcgctgcgcctgcggaagggggaaattctgggtatcgccgggctggccggcgcgggcaaaaccgagctgtgcaaagcgctgttcggcgccagcaaaagcagggtgcagcgtggcgagctgaacggccagccgtggcgaccgcgcgatccggccgactcggtggggcgcggcctggcgctggtcccggaggagcgacgcaaagagggcattttcattgaagagccgatcgcgatgaacctggcggtcagcgccgataacagcttttcgcgctggagcctgtttggccatcggcaggcctggcgctgggcggaggaggtgattgcccgcctcggcgtgcgcgctaccggtcccggtcagacgctgcgccgtctttctggcggcaaccagcagaaggtggccattggcaaatggctgcgcggtgatgccaacgttttgatttttgacgaaccgaccaaaggggtcgatgtgaaagcgaaaaccgatctgttcatgctgatcgatggtctggcacgggaaggcaaaggggtgatttatgcctcgggtgaattcgccgagctggtcggtttatgcgaccgcatctgcgtgctatgggacggacggatcgtagcggagatccccggcgcggatgcccgggaagagacactgctttattattcaaccggaggagcggcagcgtgagcaaggccctggcagtaaacgcgacggtatcgggccgtcagcgattttttgattttctctataagtggggcatgttgctgaccgtggtgctgctggtggcggtctttggcctcgcctcggacaacttccttgacccgttcaacatcatcaacattctgcgctcgattgccatcgtgacggtgattgccattggggtgtcgatttccctcaccatcggcggcttcgatctgtccgtcggatcgacggcatcgctggctaacgcgctggtgatttccctgtttgtctggcatggcctggggaccaccgaagcgattctgataaccctcgcgctctgcaccctggtggggctgtttaacgcctttctgatcgtggtgctgcgcattcctgacatgctcgccaccctggccagcctgtttgtgattcagggcgtggcaatgacctacagctacggtgggtcgattaccgaaaacatggtgctgccgagcggcgagatggcggagggtactatcccggcggcctttggcgcgctggggcaggtgccgaccatcgtcattatcatgctggtggtgacgctggtcgcccagctcgcgctgtcgttcaccacccacggacggcggatgtacgccatcggcggcaacccggaggcggcgcggctctccggcctgcggatcacgcgttacaaagtcgcagcatacgtgattgcctcgctgctggccgggctcggcggcattctgctggcctcgcgcatcggctcttcgcaggtcaacgccggcggcggctatctgatggacgcggtggccgcggcctggatcggcttttcgctggcgggctccggcaaaccaaacgccctggggacgctggtgggggcggtgatcctcggcgtgctctccaacgggctggtgatgctctcggtgccgtattacgcgatggacattattaaagggttggtgctggctggcgcgctggcactgacctattttcagcgccgtacttaacattttacagggtaaaccgcatgaaaaagatcgcactctctctgatgacgctgggtctgctgcagtcgacggcggcgctggccaccgccccgacgccggtgccggcggcgattgccgaacacaacggcccgatccgcattgccgtgatccgcaacctcgggtctgacgataacaccacccagtttgtcgccggggcgttgcaggaaggcaaaaagctcggtttcaaaatcagcaccttcctgagcaacggcgatgacgccaaattccaggacttcgtcaaccaggccatcagccagaaatacgatggcattattctctcccaggggcgtgacccgtattccaccgccctggtgaagaaggcggtggacgccgggatcaaagtggcggtgttcgataccgcggtaagcggtgagatccccggggtgacggtcagtcagcaggatgatgcctcactgaccgagctctcttttggccagctggtgaaagatttcaacggcaaggccaacatcgtcaagctgtgggtggcgggcttcccgccgatggagcgccgtcaggcggcttaccagacgctgctgaagcaaaacccggggattaaagagctggagtcgatcggcgccgtgtcatccgatgtgcagggcgacactgccaacaaggtgggggcgatcctcgccaagtatccgaaagggaaaattgacgcgatctggggcacctgggatgcctttagccagggagcctataaagcgctgaaagagaacggccgcaccgagatcaaactctacagcattgatatttccaaccaggatttgcagctgatgcgcgaagccggcagcccgtggaaggtgagcgtggcggtggatccgaagcttatcggcgcgaccaacgtgcggctgatcgccaacaagatcgccggcgagccgacgccagccacctacgacttcaaggcggcagcgattccccaggcgctgctggcggcccagccgggagcggtaaacgtggcgtcgctggggaaaattatccctggctggggccagaccgaagactttatcgcgccgtggttcgcgacgctggaagcgaagaacaaataaaatcaagccgggtggcggtgggcggcggcctggtgccctcgccccggccctctccgcagggagagggggaaaaccatgccaccgggcgaaagggatcccctatgtcagcattaccttcccccgaatacagccgcaatatgcggctgattggccatagcgatcagggcggtcgtccggacggcgtgcagctgatggtgcatcgcggattcgcctatatcggccatatggtgtcgcagggtttttccgtggtcgatgttcgcgatccgacccggcccaccaccgtcaactatattgccgcgccgccgggcacctggaacgtgcacctccaggcgcatgacgatctgctgctggtgatcaacgcccgggatctgtttgccgacgcccgttttgctgatgagaaggtgtactacacccgctcggtgggtgacacggtcagcgatgtgcaggacaggggctggagcgccgggctgcgcatctttgatatttccactcccgcgcagccgcgggaaatcagtttcctgtcgcttaacggcatcggtattcaccgcatctggtacgtcggcgggcgctgggcgtatgtgtccgcgctgatcgacggttttaccgactacatcttcctgaccatcgatctggccgatccgcgtaagcccgaagtagccgggcgctggtggctgccggggatgcaccaggcgggcggtgaaacaccggactggccgcagggcaaacgctatgcgctgcatcacgccattattgccggggataccgcctacggcagctggcgcgacggcggcctgacgctgctggatgtcaaagaccgtacccagccgaggctgattagccatcgcaactggagcccgccgttcggcggcggaacgcataccgcgctgccgctgccggatcgcgatctgctggtggtgctggatgaagcggtgctcgataaccaggaggacggcgagaagctgatctggctgtttgatatccgcgagccaaccaacccggtgagcatcgccaccttcccgccgccggacgaagcggattacgtggcgaaaggggcgcatttcggcccgcacaacctgcatgagaatcgtcccggcagctttgtcagctcaacgctgatttttgccacgtatcagaatgccggcgtgcgggcttacgatatttccaacccgtatcgcccgctggagaccggggcgctggtcccggctgcgcctgagagaatgatggatacccgtcccggccgcccgcgggtgatccagtcctgtgacgtgtttgtcgatgcgcaaggcattatctacagcaccgattacaacggcgggctatcggtgattgagtatctggggtgagggtaaggtaaacgcaaaattgtgctcgcatgtctgccgggtggcggttttcgccttacccggcctacgaaagagtgcaagatcaaaccgttatgcggctatctgtaggcccggcaagcgcagcgccgccgggcaatccccgaaaatagcacttttttagggggtgctccctctccctgttggagagggttggggtgagggaaacaggcgcactcagctgtactggcgtacccgcgccagcagctcgtcgacgctgtcgatacgctcggccagcacgatcagcgctctgcccagggtaatggcgtggcgcaggcactcatgacgcatggcgtcgtcctggatagtgtcgatatccgcgacgtgcgacagtccgacgctgcggcggatcagttcgctgccgcagaagccgaccgcgtccgcccagactttcttcagaaaggcggaggcatagccggggtaagccagcgccgcgtcgcgggttttctccgccgccagcgcctggaagcgctcggcgaaggtggtccacagctggtggatgtcgttcagccgctgctcgcgcgcggcggcggcatcgcgaatgccgagctggcccggcaggccgcagtagttaagcagcaggttgccgatggcggtgccgatatcgaagccaatggggccgaagtagccgaactcggcgtcgatggccttcaggctgccttcggcaacgaagatcgacccgctgtggatatcgccgtgcagcagcgcttccgcatgggcaaagaaacggtgcttcagcgccgccaccgccagcttaagctgggcgtcgtcgcgcagggcggcgacatcggcctccagctccgccgggtagttattgcgctcgtggatctgatacgggtcgttaaagaacagatcctcggtgatctcgcacatcgccgggttaataaactgcgccacctgcgcctttttctcgtggggatggaggtagaaatcgctggtgtgaaacagcacctgcgccagatagtcgccaagctggcgggccgcctggggatagtagacgttagcgataagctctccgcgccagatgcggtggtcggaaagatcttccatcaccatcaccgccagctcgggatcaaagtgatggatttttaccgtgtgctgcgggctgtgctgatagtgggcgaccagggtctgcgcttcgagacgggcgcggtcgagggtcagcggccaggattcgccgacgcagcgcacgtagggcagggcctgtttgacgatcgcccggctgacgccctgacgatcgaacactttaaacaccagattgaggttgccatcgcccacttcctgcgcgctgaccagctcagatgggttgtcgatgccggcgaactgttgcgcgtaagccacggcatcgtgggcggtgaaggtatggtattgcgacattgcctcgatcctcgaattctgattaagccgttcagacgtctatacttctggattccatcctgacacaatgtgatacaacaacgcaacagggatttaacgacatgcagacattacagaccaccagcctgcgggtgagtgaaaatcagctttttattctcgaccagcaggccttgccgcaggaacaacgctggctggcggcggataacgttgcgctgctggtggaccatattcataccctgcgggtgcgcggcgcgccgctgattggcctgtccgccagcctgctgctggccctgctggcccagcgcggcctgaaccgggatgcactccagcaggcgctggagacgctgcgcgcggcgcggccgacggcggtcaacctgatgaataatctggatcgcatgaagcaggcgctggcccgggaggattacccgcaggcgctggaagcggaagccttgcgtctggtcgaagaagataaacagctgtgcgaccgcatcgctgaggcgggcagtgcgctggtgaagcccggcagtcgactgctgacccactgcaacaccggtggcctggcgaccgccggggtagggaccgccctgggcgttatcgcgctggcgcaccggcagggaaaggtgaccaacgtatgggttgatgaaacccggccgctgctgcagggcggtcgtttaaccgcctgggagctgggcgagctgggcgtgccctatcagctgatcgccgattcaatggccgccagcctgatggcgcaggggcaggtggatgcggtgtgggtcggcgccgaccgtatcgccgccaacggcgacgtggcgaataaaatcggcacctattctctggcggttttggcccattatcaccagatcccgttttacgtcgctgccccgcagaccaccctcgatcgctattgcccgaacggggcggccattcccattgagcagcgcgccgcggccgaagtgaccggagtggcgggcagctttggcgcggtacagtgggcgccgacgggggctgccgtttacaatccggcgttcgacgtcacgcctgctgggctgataagcggctgggtgctggacagcggggtggtcaccccggcgcaggtcgccgccggggcgtttgcgccggacaatggataacggacgtcgtgccgggcctggaaaaaaaggttttcccgggcccggacaaacaccgcgccgctacggcaggaccatggctaccgccggggcggatgatcggtcgatacgctgaccgagggcggtaatagccgcctggaagggacacagcgtaccgacgtcggtctgacggcagcccggctgatgccactcctgacgcagcatcgggtgctgcgcgtccggcgtctgcagacgacgcaggtcgtcgaggccctgggcctggaaatagacccgcagatagcgttctccgctcttcgcgttgcgccagcgctccagcaccaggctactgcccggcgggatatttccccggctgtagcccggcagctgccagctaaagttcatcagcgtgcgcaccatggcgatattggtgtcatgggccaccagcagcagccagcgtacgttcggattcgcctccggtttgacgccatcgagcatagcgttgagcagcaccgacccgcgtttttgcgcggtatacaacacatcgttactcagatcgtagttttccgttaacagcggcagcagggcggtgatctgcctggcctgggtgatcttgccccacgccagctggctgagaggcaggttttcactccagccgagacgcagcgtctccaccatattggccatcacgctcagtccgctaatggtggtcttcccacttttgctctgctcgacctgccacggggtatcgaagatcgggcagggcttatcggcctgacaaaccgcctgtttcaatagctggatggtcggcgccagcgcctgccgacgctgcgccagatccccggccttctctttcaccgccgccagctggcgggcggggtcggtttgcgtggcggcgaacttgtcggtctgaaacaggggatcggcatccccgctgacataatggatagcgacgccgcagccggggaaggcgccatccaccagcgcctgggcggtcgctcgcgtccgctgcaacgggctggcgcgcacgtatatcgactccgccgtcgggcatccggcctgcagcaggccgagctggcggtaatgctggccttccgcacgccctttgttgaccacggcggcatagccatggccggtgagctccccgtcatgggtggtccactcggtccacggtcggccggtggcggcctcgatggcttcccggttgccggccgtcggcggacgaataccgtggcggctgagctcgaccactttctccagctgccagtccgcggcggcggcagattgcagcgccagcagcggcagcgcgcaggcgataaacaggcgtaacagcccctgatgtcttgcaggcatcatatcttcttccttattcgttaatcggttatgaggagaacgaggtctgccgttcgacggcatggcgccgggcgacgatggcggcagtggtaaaacagagtagcgcggaacccagaccggtacccacccagaacagcgccaacgtgctgaaatcatacagcgttttgccgttctcaaggatagccgttttatcaataatgatcccggtgagaaactcgcccaggccggcgccggcgtagctggcgatgccgatggtgccgagcgcggcccccgccgctttgcgcgaagagatatcgacggcgatcagcccgccaaggaagcaggtcagagcgccaatagtggccccgaagataatcatcgccagaatatcagtgtagtaattgtgcggcgaccagagcatcagggcgaagccggcggtgttcagcaggctgataaacccggccatcacgctgcggttgcgcgggaaaaagcggtcggagagcatgccggcgatgatggtcccggcgatgccggcgatagcgttaacgccgataatcccggacgcctccagggtggaataagctttatcctgctcgagaaagaagatcccccaggagttgacggcgtagcggtcgatgtacataaaggcggaggcgagggcgagggtccacagcgccgggttgcgcagcgccagcagctggtttttaaacaccgagccgcgggcttcgacctcctcctgcggttcatcgcggatgacgttgatggaagggaagccgctgctctgcggcgaatcgtgcatgaacagcaccagcagcaccacgccggcggcgccgagcgcggcggtggacaggtagcccatctgccagccaaacccggcgatcaccgcggcgatcaccatataggtcaccgcctcgccgatattatgcgccgtcgaccagatgccatagaaggtgccgcgctccttaacgccgtaccagcgcgccagcgagaccgcgcaggggccgacgcccatcgactgcgcccaaccgttgatcccccagaagatggccagcagcagggcgttggtggtcatccccatcatcaggttcatcccggcgctgagcaataaaccgaggctcatatagcgcaccacgttggcgtgatcggcgataaaaccattgaccagtttgccgatggcgtagctgaagaacagggtagagccgatcatgccgagctccgtcggggtgatccccagctccaccagcgcgcttttagcgacggtgaaggataaccggcagacgtaaaaggtgacgtaggccagggtcatggcgataaaggtttgccagcgcacccggcgaaaacggtgttcatcaaacgcggcgcccgctttcggcggcgacgcccggaaaaaagcgataattccagacataggtggttctccgcaggtcggaggcctgactgattgatgtggttcgtccgtgaatgaagttatcgttactgtgtagagtacataatcagaaatagcctgacccgtaagggttaatgtaatggttgtgggatcatctttttcagctgcgggtagagcgtctggctggccagcagcagcggattgccgcgctggatcccctcctgcgccagaaaatcgttgctggcgccgcccgcttcgcgcatcagcaccagccccggcagggcgtcccacgggttcatgtgcggctcgtagtagccaatcaaccggcccgccgccgcccaggcgctcatcaacgccccggagccgttgcggataaacatgccgccgtcgctgagcagcgcctgcagaaacggcagaaagtccgccggggtgacgcgatgcgaggtgccgacgcccatcacgccctctttgaccgtcgtcgcggggtgcggacggatcggagcgtcgttgagccaggcgccatggccccgcagggcgtgaaacagctcgcgatggttggggtcgtagaccacgccgatgaccggttcgccgtcggcgacgatcgccagcgacaggcaccaggtgtgcaggccgttgaggaaacagctggtgccatcgatggggtcgaccacccacagcactcgcgcgtcgggcaggcgggcgccgctctcttcgccgagaaaaccatcctccggaaacgcgctctgaatgcgctgtttgacaaaggcctccacccgcttatcggccacgctgaccacatcctgcaggtcgtcgcccttatggtcgacggtcaacgcctcgcgctgttgatagtattcaaacgccagctcagcccccgctttcgccagctcgcaggccagacggtagcgggcctgtagcgcttctgattcctgagattgcatagtgactccccattttgcacacgtgtgcattttgcgtgaaaaaaacagccccgaagggccgaatgagtgtggccgggtttcgcagaagattctgtgatcgctccagcataaaatgattttttcatttggcgctatggcgaataattagtttcaccggcacttcgcgatggcgcgagggcaggctgaagcgggcgatccgcgtcattaacaaatccaccgcgtggtgggccagcagggcggtattctgctgaacggtggtgagctgatagggctgccagtccgcctgcgggatatcgtcaaagccgacgatggccggcagcggggcggcggcgtcccgcaggccgtcctgggcgcccagcgccagcatatcggtggcgcaaaacagcgcctgcatcccggggttttcagcaaccaattctctggcagcctggtagccggcctgatagccgccgccgtcgcagaagcggctgctcaccgccatatccgacgtccgggcgataaaagcctcatagcgctggcgggtgctgaagttctcgcgattttcgccaataaagccaacctgccgccagcctcggcggctgaacagatccgccaccagcttcgctccctgggcgttatcgctgcacacccggtcgcagccggcgaggtccgcatggcggttgatcagggtgacggggatcttgcgcgcgagatactcttccgccagcgacagcggcggcgcgccggaggtgatgatcaccccggcgacgtgatagctcagcagtagtttaagcgagggggcgagctgctgcggatcgtcagcgttcatcagcagcggcataaagccattgagcgccagctgatggaccagcggcgccagcagtttgctgcgaaacgggttgtcgaaaccggcggtgacgatgccgataaaattactgctgccggtgatcatcgtccgggcgatgatattcacctgatagcccagggcttccgcggcgctcagcaccttctgccgggtcttctccgacaccgaggcgccgggggtgaaggtgcgggagaccgccgagcgcgagaccccggccagtctggccacgtcctcggccttaatccattttttatcgctcatcgtcgtttcgcgccgtctgttttccaggaagccgacgcccgggcgggcgtcggtcacgcacactgcctgaaaaggtatcacagaaaggcgtcgtcgcgcagcgccttgcgccctatgccgggtagcggatgtgctccacctcacgctgcaaaatcaccctgccgtggcgaatggaggtcagcacccgtgcctgacggcggacggcctcgtagtcgttttcagcatcgaggatcagcaggttcgccgggcggccttcggcgaggccgtagttatcgcccagacacagcgcccgggcgctgttgtcggtgacgaagtcgaggcagcgctgcagatcgtcatagccgagcatatggcagatgtgcagtccggcatccagaatgcgcaggatattgccgttccccagcggataccacggatcctgaatcgagtcctgggcaaagcagacattgatgccggcgcgatccagctccgccacccgggtgacgccgcgccgtttcggccagctgtcaaaccggccctgcagatgaatgctttcggtcgggcaggagatgaagttgatgcccgaggctttcagcaggcgaaacagctttgagcagtaggcgttatcataagagcccatcgcgcaggtgtggctggcggtgacctgggcccccatgccgcgcacccgcgcctcctccgccagtacttcaaggaaacgcgattgcggatcgtcgatttcatcgcagtggacatccaccaggcggccgtagcgctgggcgaggtccatcaaaaacatcaccgagctgacccctttgtcgcgggtgttctcatagtgcggaatgccgcccaccacgtcggcgcccatctcgatggcgcgcgtcatcagctcccggccgttgggatacgattcgattccctcctgcggaaaggcgacaatctgcagatcgatgagatcggcggcctcttgtttcaccgccagcagcgcctgcagggccgccagcgacgggtcggtgacatccacatgggtgcggacgtgctggaccccgaaatcgcgcagcatgccgatggttttcagcgcccgctggcgggtgtcctccggggtaatactcgctttgcgctggctccagcgggtaatgccttcaaacagggtgccgctgcggttccactccggctcacccgcggtgagggtggcgtcaagatggatatgcggctcgacgaagggcgggatcgctagccggccctgggcgtcgatagccccggcgtcggcagtctgcatcgcggcctgggcggtgatgcggtgaatcatcccgtcctgcaggtcaagagtaaacagcgcctcctggcggcgcaggcgagcgttaataattttcatggtgggtcctgtaaatggttttgcgataaacgccagatcaccagcgcgaccgaggcgttgagatgaaactgagggtggctgaccgggtagccggtcagtttttcaatgcgctggatgcgctgatgcaacgtgttgcggtggagacccagccggtcggcggcccgcaccacgttgccgttctcctgcagcagcgtctcgagggtctccagcagcagccatggcgctttgcggcccggctcgatcaggcagcccagggtgtcgtgcataaaatcgttgagcagcgccgggtcgctgatcgcggacagcaatttgataaaccccagctgctgatagtcgctgatacgctgggtcggccgcagggtatcgcacagatccagcgcctggcgcgcctgcgacagcgcccgcgggtaaccctgcagctgcctgaccggcgcggagaggccgcagagcagcgataaactctcctctccgtccgccagggtttgcagccactgctgtagccattttttctgctgaaagccttccccctcctcatccggcagcaggaaaagaaacatattgctgcgctccagcagcgggaagggattgccctgctggttgagctgctgctgcagctgctgacgtacgctgcggtgggcctgcagcagccaggcttcggcctgctcgggcgggaactggcgaaacaggcgggacagcccctccagacgcagcgccgccagccgcagcggacgggtaaaatcgagctgctggtggagggcgcgctgatggagcatctgcaggtccggatagtcgccggtgaccagctgcatcagaatgtcgcgctgcgactgcaggacgttttcgctgcggaccagcgcggtgccgatgcgctcggtgacaatcaccatcttcagcaggtagggctgctcgatcagcggcatgcccagctcgtcggcaagggcgatcagcgtggcgggaatggcgtggatataggcctcgccggtgaggatcaccatcccggcgatgccgcgctgtttgccctccatcagcaactggatcaggttggcttcatcccggggatggttgatgccggtgataaacaccagctcgccgcccatgatccactcggcgatatgttcattttccgccacatagtaccagcgtacggcccgctgcagcccttgctttcccgcccgcagacgcagggcggagagtccctcaagggccagcagttcgctgaccgtcaggctcatggctcctgctccgcgacggcggcaggctggcgtttgcttagcagagtcagggcgatatagaccagcgcggagacggagatccccaccagcggcgcgatccacggcgaaagataggccaccaccgcgccggcggcgtaggcgccgagtcccagccagttaaaacgcggcaggcgggcgttctgcagcaggggatagcgcccgccgcgggcgaaccagtagtcggcgaggatcaccccgccgatgggtggaataatactgcccagcagcacgaggaaggggatcagcatttcgtacatcccgccaatggccagcacaatgcccaccccggcggcggcgagggtcagcgtccggcgacgttcgctgcgcagcagatggcaggcggcggcggagacgttatagatggtggggccctggatggtcagcaggttgagacagagcatgatcaccgcggccaccgacagcccctgcaggatcagcacttcaacgatatcggcctgttgatagacgatagcgcaccaggcgccggcgacgatcatcagcccgttgccgatgaggaagctgcccatgctggcgagaatggcggtccggctggagttggccagccgggtccagtttgtcgcctgggtggcgccgctggcgaaagtgccgaagaccatggtgatggccgccgaccagctcatggtgtcgctcggcgcaatacgggtcatcgcctgccagccgccggcgtggtgcagcgccagatacatggagaccatcagcagcacaaacatcaatggcaccgacaggcgcgacagcgcgtccagtcccttgtagcccaccagcgcggtgaggcagaacaaaatgccaaacagcaccatcaacggctgggtcagcgcctcgggcagggcgaggatcttcaccagcgagatagcgaccgtggcggtgccccaggcgtaccagcccagctcggcaaaaccaagaataaaatcggccagcttgctgccaatctccccgaagcagaaccggcccatcagcaccgtattcaggccgctgcgcgcggcgatccagcccagcgacgcggcatagagagccagcaaggcgttgccgatgacggctatccacagcagattgacgatggaaaaggagacgccgagtttaccgccggcgaacattgtgccggtgaaaaaggtaaagctgaacaacaccatggcgatggaaaatacgcctttgcgtccggcggcgggcgcttcgacgaggggaaaatcattgctgtttgacatcctggaacctctggctggtagatgggcggtgattgccggaagtagcaagagatgtgccaggaaaaaccgggcacggggaatagcgcgcggtgtgcaacatgcacagttattgaaggatcccggacgggtaatgccattctactgtgcatcctgccaggttttgcaccagtccagggcagaggagggcggtgagcgcatccctggcgccggaggagaattttagccaggacgatccgcctgtttttggccagagagtagtggagaatagcggtgtactgaaaacggttggttaaatcactgtgaataaaggttatttaatatgcttttatgatataaccatttgtcttgtatgtgtttcctgaaatattgtcccctccggttagcggtgttagtatcggataaatagccatttagacggctaaataaatcatcgctaacctaaggaactgctatgtggcaagaaagactcgcgcaactggtcaccacctgtcattggatcggcgcgaaaggctgggcgccggcgaccggcggcaatatgtcggtgcgtcaggatgatacctggtgctggctaagcgagtctggccgcgacaaaggcagcctgacaaccgaggattttctgcaggttgagatcgccaccaaccaggcgccttccggacggaagccgtcggccgagaccggtctgcacaccctggtgtatcgcctgttcccggaagccaacgtggtgctgcatgtgcataccgtcaacgccactgtgctgtcgcgcatcgaaaaaagcgacacgctggcgctgcaggggtatgaaatgcagaaaacccttagcgggcagcatagccatctcgataccgttccgatcgccatcttcgataatgaccaggatattgacgccctggcggcgcggattgccgattatgcgcaaacgcgcccgctgcgctacggctttctgctgcgcggccacggcctgacctgctgggggaaagatattcaggaggcccgccgtcaactggaggggctggagttcctgttcgagtgcgagctgatgcgccgccgctacgagccctgagccggagcaggtatggatttttatcttggtatcgatattggcacctcgcgggtgaaagcggtgctgtttgatcagcatttcaccgcctgcgccagcgccgcggaaaatacctcaccccgcctgtcggccaatggctacgcggaacaggatatgacccagctgtggcattcggtgctggctattctgcgccagattgcccgccatccggcgctacaggcggggcggctgcgggctatcggcctcgccgggcaaggggagggggtctggctcagcgatgagcagggcgaaccggtgggcccggggatcctgtggagcgatacccgcagccacgagctgatgagcgacctgctgcgccgacccggcttcgaccgccgctatttcgccgataccggcacccacctgcagccctgcaataccagcctgcagctgtactggctgaaacagtatcagccggcgcggctggcggccgcgcgctatctgtttttcgccaaggactggatccgctttcgcctgaccggcgtggcggcgctggagctgacggacgccagcagctcgttactcaatcagcagaccggcagctggtcctcggtggtgatgaacgagatggggctgaacgaactgctgccgctgtttcccccgctgctggccccggatgccccggccggcacgctgagcgacgcggtggcggcgctgaccgggctgcccgccgcgacgacggtggccgccggggcgctggatgtctgtagcgccgcgctgggctgcggcgcggtcaacgaaggggatatctacacgatcctcggcaccacctgctgcactgggatcgtctgccgcggcccgcagacggtgaacgaggcgacgcgctttgtcacccataccgaagccggacaggtgatctccctgtttccgatgcaggccggtacgccaaacattgactggctgcagcagcatatttcgctggacgccgatctggggcgcctggagcaggcgatcgcggcggtggagccaggcagcggcggcgtcttctggcagccgtacctcaatggcgaacgtgcgccgttttacagcccggacgcgcgggccggctttttcggcattagcccgcacaccacccgcgccgaactgcagcgcgcggtgtttgaaggcctggccttcgccattgtcgatgcgctgcagggttatccgcagggcggcgagctgtatctgaccggcggcggcgcagcctcggcgacctggctgcagattatcgccgactgtaccggacgcacggtggtctccagcgcctttaacgaactgagcgcgcgcggcgcggcgatcctggcggcccgtagcgtcgcggcgctggccgagacgcctccgctggcgcagacccgctatcagccgcgccctcaggcgcatgcccgctacgcggcgctgtatcccgtttaccgcctgctgcgcgagcagatgctgccggtatggcaggccagacaggccgcccttcaacctctttctcaggacctacaaccatgaaaatcgtttttaccgccgagcatgctggcgaccttagcgccttccaccagctgggcgagctgctggtggaggggtgggcgctgggcaaaccgaaactcagcgccggtcagctgattgagctggcccacgacgccgaggtgctggtgaccagctatgatgaggtgacggacgcggtgatggccgcctgtccgcgcctgcaggtgatcgcctgcacccgcgcgaatccggtgaatattgatacccaggccgcccaggcgcgcggcatccgggtgctctacaccccggggcgcaatgccgatgccgccgcggagctgacgcttggcctgatgctcagcctggcgcgccatattccgcaatcccatgcggcgctgaagcggggggaattcacgcaggctgacaatgccgccgccgccactcagcagggtctgcggcgggatgtggtctgggacgtgagcccggaaagcccctatgaagtgtttaaaggcactgaactgcgcaataaaacgctggggctggtggggtatggcaacattggccgccgggtggcgcgtatcgcccgggcgttcggcatggcggtgttggtggtggatccgttcgtcgccgcagaggatatcaatgagccagggctacagaaaacgaccctggaggcgctgttccgcgaggcggatatcgtcagcctgcacctgagcagcgggccgcacagcgacgggctggtgaatgccgcgctgttaaacagcatgaagcccggcgcgctgctgatcaatacctctcgcgcggcggtggtcgacgaggcagcgctgattgatgccctgcgccacggcccgctgggcggcgcggcgctggatgtctatcaccgcgaaccgctgtggcgcgatcatccttttgtcatcgagttcgataacgtgattatcacgccgcatatcgccggagccacccgggagagtatcgccaaacacacggcgatgattgccgccgatcttcagcgctatgtcgccggggagccgctgctgtaccagtggcgttaagccgcttgcgccgccgcgttctgcagcggcgcgggtccatcgtcaggggcgatgggccgccataaaagcctgggtctgttcccagtccactaccccggcatccgatcccatcccggtcgccaccagcgcggccaccgccgaggcgacgtcacatgctgctttcacgctgagtccgcgcgccagtgcggcaataaacccgccgcagtagctgtcgccgcagccggtggtatccaccgcctcgaccggccacggcgcaatatgctgcggcccgccatcgcggccgataagccaggagccgttctcgccgtctttcagaatgcaggtgcccacgccgagcgccaggaagaagcggccgatggcctccggctgcgtctctccggagagaaaggcggcttcctccagcgaaggcatgaaataatccaccgacggcaacaggggccgcagtagttcgagggtctcttcattcggggcgataaggtcaaagctggtggtgactccgcgcgctttggccgcctgcaacagccgcgcgctctgtccctggtccattgccgccagcagcccggtcccgccgtgatgcaggaaacgacagtcaaggacggcgtcaaattccgcttcactgacaaacagggcgtcagacgcgccccggcagtgcagggccggacgttcgccgttggggcgaatcggcaggatcgtcgccgaggtctccttcagcgcggtgcgctggataagcgagcagtcgatgcccagccgggcatagctggcgaggataaagtcggccttttcatcttcgcccaggcaggccaccgctgcggtgcggatcccgagcttcgcggcgttgatattagccccggcggcggtgccggcggggttgagacgaatttgctcaataaaggcgacgccgccgcgcggcgggatcgccaccaccgggcgcccggcgatatccagaatagtcaggccgacaaatacggcgtcaaaggttgccatcgttctcccgtttagcgatgcgtttggcgcaggcgcgcctgccagaaggatagggcgagggccaccaccagaatcacgccgaccagcgcgtccttcaccagataattgagccccatcaggttcaggccgttatcaataatggcaaggaacagcacgccgccgagggtgccgaggatgctgacccggcccagacgggtaaaggcagtgccgataaatactgccgcaatggcgtccatcaggtaagactgcccggccagcggggtaaactgccgcaggttggcggagaggatcaccccgccgacggcgcagagcgccgaggcggccaccagcacgccgagcatggtcaggcgatcgcggatcccggcgatacgcgccgcttcgctgttctgaccgatggcgcggacatatttgccccacagggtgcgctcggtaaccagccaggccgccagccacagcgccagcacgatcgctaccggcgtggggatcccgccaaggttgcccaccgccaggtcgtgatactccggagccatccgccgataggctatcgcgccgccgccgtcggtatagatgcgctcggcgctgctggcgataaaccaggtgccgagcgtggcgaggaaggaacggatccggcagatgaggatcagaaaggcattgagcaggccaatcagcaccccgccaagcagagcgcagcccaccgcggcctgccacggcagatgccaggttttcagggcgacgagggcgaaggcggcgccgaaatcgagcgcgacgcccaccgacagatcaatcgccccggcgctgacgatcagggtcatcgccatcgccacaatcagcaggatcgcgctgccctgcagcaggttggcccagttatccacggttaaaaataccggattcgcccagccaaacagggcgatggccagcaggatgatgacgccaaatccggcccgcgacagccaggccagcgggctgctggccgtctgttccgccgacgcagaggttttcagagtgatttgactcatgcctcgcctcctttgtgtctgaccgccgaggccgccagcaccaccaggatcaggccgcctttaatggcgcccatccagaagatattgacccccagcaggccgagcccgttagagagggcgttgaccaggattgcccccagcagcgcgccccagatggtgaccacccgacggcgcgagaaggcggcgccgataaaggtcgccagcacggtctccagcagcagcggcgtggccgtcccgctggagctgccggagccctggctgagcagcggcagaatagccagcccggcggcaatgcccgctaacagccagaccagcagggtcaagcggcgcacgttcaggccgctcatctgcgccatatcgcggttgccgcccaccgcctgcacatgctggccgaagcgggagtggtggagcaggaactggaacaggataaacacccccagcaggtagaccagcggccagggcaggcccagcacgctgttgtcgcgaaaggcgaccatcagcggatcgctgaccgcgatgcgccgctggccggtcaacagatctgtcagaccggtaaacgccaccgaggtcgagagggtggccagcagcggcggcaggccggccgccagcaccagcaagccgttgatcgccccgcacagcaggcaaaccgccgccagcagcgccagcagcaggagatatggcgtgtgccattcggccagcccgaggctgagcagcgcgacgccgagcaccgccgtcgccggcagggagaggtcgatgccgccggagaccacatcatccccgcccacggcgataacgcagaccaggccgaaacagaggattgccagcggaacgctctggactagcatcaggctgatattttgccagctgagaaagtagggcgactgtacgctcagccataccagcagcgacagaaacaggatcaggggaaatttttcaatcagcgtcgccaggcccggacggccgcgacgctggatagcagtactcatggtgaaggctcctgtccgccgttgatcgccaccagcagggcgtccagcgttagcccgcgggtgggcagattggccgccagcgcgccgcgccagaggaccaggatccggtcgcatagtccgagcagttcgggggcgtcgctggaggagaccagcaccgcccgtccttgatcggccagctggcgcgtacgttgataaatatcccggcgggcgccgatatcgacccccagggtgggttcatcgagaataaacagccgggcatcggtccccagccagcgggcgaggatcgctttttgctgattaccgccgctcatgtagcgtaccggcagccccggtcgtcccgggcggatcgccagctgttctatccagtcgcgcgctttctgctcggcgataccccgccgctcccagccaaaggtggcggtttccggcagcgaggcgagattaatattgtcggcggtggtgaagggcaggatcagcccctgatggcggcggtcgcgtggcaccagcgccatgccggcgcggatcgcctgctttggcgtacgaatgcgccgcggccggccttcgaggtggatggtgccgcgttccgccgggcgtaagccgtagagtaggtcgaccagcacatcgcgtccggcgcccagcaggccggcgacgccgacgatttcgcccggctgaatatcaaaagaaagatcctgcagctgccgcccgtcgctcagctggcgcaccgagagcagcggggttgccccattgtctgccgccgggcgctggcgcggagtatacagctggtcgatttcccggccgaccatcatggcgatcagcgcctcggtattctgcagcaggtcgcggtccgggtaaccgaccgcttccccgttgcgcagcacggtgccgcggtcgcagagggtggctatctcattgaggtagtgggaaatatacagaatggcaatgccctggtcgcgcaggcgcaggatggcggaggagaccagactggcctcctgcgcctccagggggcggtgggttcgtcgaacaccaccagccgcgctgcgccgtcgatcagcgcgcgggcaatttgtaccagcttgcgctcggccaggctcaggtcgcgcaccagccgttcggggtcgatcgccagctgccagttttgctggaaaaattgcgccgtggcggccttcatccgtcggcgatccagcgccccccagcgggtgcgatactcctggcccagaaacaccgattccgcgacggtaaagtgcgggatcaggttcagctcctggtggataacgcggatgcccgcggcttcgatggctgccggattgccgaggggcagcgggtgaccgtcgagggtggcgctgccgctgtcggcctgatacacaccggcgaggatcttgatcagcgtcgatttaccggcgccgttctcgccaatcaggccatgaatctcccccggattgaggcgcagggtaaccgcattaagcgcggtgacgctggcaaaacgtttaccgatctgctccatgaccagaccagcggcggggcgttccccgccaggatgttgattaatcactgcagctcgccgtatcccaactgtttatacaccgctttcgcttcctgcggacctttcaccggaaccaccggaataaaggtttgcaccggtagtttctggccggcaaagtagcgggccacgttgtcagccgaggtctggccgatcagatgcggctgctgcgcgacgttagccacgaacgggctgccgggctccgccatgatctccagggtctccggaccggcgtcgatggccgtcactttcacgtctttatcgcgaccggtctcttccagcgcctggacgatgccgatggccggttgatcccagcaggcgacatggatggcgtccagtttgcctttcggatactggctgagtaattcgagggttttcttgcgcgcgtcttccggcgagttggcgaactgttccgcgagctcgggctggataatatgaatatccggataatccttaaggacatatttccactgatcgtagcgaattccgcaaatacgcagcgcgctggagaaggcgttaaatacggcgacgttgcctttgccgcctaattcatccgccatgtagcggccgatggttgagcctaaggtgtagttatcggaagtagtattgttgaccgaatattgagaaacatgatctacggtaaataccgggataccggcatcacgcaatgctttaaattttggttcgacggcgctatcgccgagaatactaattaccgcgtccaccttgcgtgacagtaaaatatcgtggttattggcatgcacctgattatcgcggccgccatcgacgccaatgactttgccccccagcttctccacctcctctgtcgcgcctttaaaggcctcgcgatcccagaaatgctgagtgccgaccacggcaacgccaatggtttttccctgtaaggagagggcgtctgcggcagcgacgctcagcgaggcaagggaaagcagtcccagcgcggcaggcaataattttcttttctgcgacattgttattatgatcctgtgatgaaggtggttgcggaccggtagcatgacaagaagcacctcgccacctcaaatacaaaataagtctaagttatgccaggaatgttatatcgcagaaacgtcagagaaaaagtttattttgtcatgagaaacctgaaaatatttcatgatggcggatagacctttttattttgtggttttatttttgacttattccgtgtttatttagcggataaagacaattttcttaatattgtgagtgcatgggaaatacggcgtctacaaagaaaaaaagaagattgcgcgggctaaagctttttttagcagagcaatgtctggccgggtaaggattattaccctatttccccgctttattgtaatgaaccttaagctgagaagaacgcgggcgctatgaagaaacagcataattatacggtgatgcactggggaacctggcaggtggagagcagtgagggcgagatcgtggcggttaagccggtgccctgggataaaaatccctcacgcatcggccagtcacttcccgacgcggtgaccagccaaacgcgcattcgccgtccggcggtgcgcgccggctatctccagcacgggccggcgtcacgagaagggcgaggtaaagagccctttgtcgaagtcagctgggaggtggccctggacctgctggcgcgcgagctgcgctcggtcaaggcgcgctgcggcaatgaggcgatctacggcggctcctacggctgggccagcgctggacgctttcaccatgcgcagagccagctgcaccggtttctcaagggctttggcgggtacaccgccagcaccaatacctatagcagcgccgcgggcgagcgtattctgccgcatattctcgggccgctgagcccgctgcaccggcagcatacccatttttccgagctggcccgggagtgtcagctgtttgtcgccattggtggtctgccgctgcgcaatgcccaggtcaacggcggcggcgccaatgaccatatgctccagtactggctggataagatgcaggccaacggcacgcggtttatcaatatcagtccggtgcgcaatgacctcagcgcggtgcccgacgccgagtggctggccattcggccgggcaccgataccgcactgctgctggccctgagctatgtgctgatcgctgagtccctttacgaccaggcgtttgttgccagccataccgtcgggtttgccccctatcgcgcttatctgttgggcgagcacgatggcgtggcgaaaaccccggcgtgggcggcggcgattaccggcctggacgcccagcgcatcgccgacctggcgcgggagatgacccgccaccggacgatggtgaatatctcatggtctatccagcgcgcccgtcaaggggagcaggcctactgggcgacggtggccctgactgcgctgctgggacagatcggcacgccgggcggcggtctcgggtttggctacgcctgcactaacctggcgggcgcggtacgaaaagcgttttccggcccgcgcttacccgccggggagaatgcggtggacagcgttatcccggtggcgcggctgtccgatatgctgctgcacccgggagaaacctatgagttcgacggtcagcagcggcgctatcccgatatccgtttagtctactgggcgggaggcaatgcgtttcatcatcatcaggatctcaaccgactgtgcgaggcctggcgccgcccggagacggtggtggtgcatgagcagtactggaccgcgcaggccaaattctccgatatcgttctgccggccaccacctcgctggagcgagaggatatcggcagcggcggtcacgacgggtttatgatcgccatgagcgcgcagatcccgccggtgggcgaggcgcgtgatgattacgctattttctgcgatctcgccgatcggctgggattcggggaagcgttcagcgaagggcgggacgccgggcagtggctgcgtcatctctatgaggagtcaagaccgcgggcgcaggaggagggtattgcgctgccctcgttcgatgacttctggcagcaaggggtgctggagtacagcgcgccggagcggccgcaaatttttctcgccgattttcgcgccgatcctgagcgctatccgctctccaccccctccggcaaaattgaactcttttccgccaccgtcgccgggtttggctatcgcgaatgccctggccatccgtggtgggatgaacaggaggccgcccggcagcgacaggaggcggcgcggtggccgcttcatctgctctccagccagccgcgcgcccgcctgcacagtcagtacgaccacggcagcgtcagccgggcgacgaaagttcagggacgcgagccgctgtggatgcatccgagcgatgcgcagggaagggatatccgcgaaggcagcgtggtgaaagtctataacgaccgcggggcgattctggcgggggtgcacctgagcgagcagattttgcccggcgtggtacagatgtccaccggcgcctggtatgacccgctggatccgaaggaagaacggtcgctcgataagcacggtaatcccaacgtattaaccgaggatcgcggcagttcgcgcctgggacagggctgtagcgcccagagctgctgggtggagatcgccccgtggcgagaggagctgccgccgatcaccgcctttgatccgccgaagtttattgaagtttaggcgttggcgctcgccggcggcggggcgggtagcccggagaaggcgcggtatgcgccgcctccggcaaagcccgcgcctggcggtttaagactgacgacagtttgacgttacgccagccgcgggtaggcgctggcgatatcgtcgccggtaaactgggcgatccagccttccgggttatcaaaaatgcgaatggcggtgaagttcggttctgatcccatatcaaaccagtgcggagtgtgggcgggaaccgaaatcagatcgttcttttcgcacagcacctggaacacctcgtcgccaatgtgcaggcaaaacaggccagcgccctcgacaaaaaaccgcacctcgtcttcgccatgggtgtgctcgttcaggaacttttcccgcagcgcctctttttgcgggttatcggcgcgcaggctgatgacgtcccagctctgatagcccttttcggcgaccagtttatcaatcgcatgctgataggcggcaatcaccgtttccgggctgggatttgcgccgaggtcgcggtcggcctgccagcgctcgaaacggacgcctttggcgttaagctgcgcctgaatcgcgctggcgtcggtgctgtgccagaccggcgtttgcggatcggtcacggaaaaaagagttaatgcgctcatgctgggatctgctccggatgaatgtcgtcaaaacgctgaacctgagggtgatggctcgccgggtcgcggtcgccgcgaaccagctgcacagtgcgcaaacccgcggcctcggcggcatcaagttcctgatggatatccgacaggaacaggatggtgccaggggcatggcccaggtgttcagcaatgttacggtaggactgcacctcgcgtttggcgcctaccagggtatcgaaatagcccgtgaacagatgagtaatatcaccttcatcgctgtagccaaataacaatttctgcgcagccacggaacctgaggaatatacatacagatcaataccctgcgctttccatttctccagcgccggcagtacgtccgggtagagatggccggtaaagtcgccgttgagatagccgtcgcgccagatgatcccctgcagcgccttcagcgccgtggatttacggtcttcatccataaaggtgaagagggtagtgataaggtcggcggtgctggcggcgggggcgtctgtttcgctgcgcaggttgtcgagaatggttttgaccggttcagcgtgctgctgagcggtcacaaagccggccagtcgttcgcgggcgtaggggaacagcacgttatgcacgaagcggatatcgctggtggtgccttctatgtcggtcacgatggcgcggatcatggtttctccagagtgggcgtagcgtggaataacattagcatttagacgtctaagcgtcttgattgccaaatattaacatcgtgttatagtggcttcaacaacagcattacaatcggtataaaaagaatgaacaataaccccttgattccagagagtaaacttcctgcgctcggcaccacgatttttacccagatgagcgccctggcccagcagcatcaggccataaacctgtcccagggctttcccgattttgacggcccgcgctatctgcaggagcgtctgacgtaccacgtggcgcagggggcgaatcagtacgccccgatgaccggcgtgccggcgctgcgcgaggcgatcgccgggaagacggcggagctgtatggttaccagcccgacgttaacagcgagatcacggtcaccgccggcgcgacggaggccctgtatgcggcgatcaccgccctggtgcgccgcggcgacgaggtgatctgtttcgatcccagctatgacagctacgcccccgcggtggcgctggccggcggcgagttacgtcgtattgcgctgcagccgccgcattttcgcgtcgactggcggcaatttgccgccgccctgagcgagaaaacccggctggtgatcctcaacaccccgcacaacccttcggccaccgtctggcagcgcgaggattttgccgccctgtggcaggcgatcgccgaacgcgagatctatgtcctgagcgatgaagtctatgagcatatctgctttgctgagggcggccacgccagcgtgctggcgcatccccagcttcgcgagcgggcggtggcggtctcctcgtttggcaaaacgtttcatatgaccggctggaaggtcggctactgcgtggccccggcggccatcagcgccgaactgcgcaaggtgcaccagtatctgaccttctcggtgaataccccggcgcagctggcgatcgccgacatgctgcgcgaagcgccggagcattatcgtgagctgccggcgttttatcgggaacgtcgcgatctgtttattgaagcgctgcgcccaagccggctggaaatcctgccctgtgaagggacctatttcctgctggcggactacagcgccatctccgatctagacgatgtcagcttctgccgctggctgacgaccgaagtcggggtagcggcgatcccgctctccgtcttctgcgccgatccgttcccgcacaagctgatccgcttgtgcttcgccaaacagccggcgactctgctggctgcggcggcgcgtttgtgccagctgtagttacttaatcgtccacgcctgggagaactggcggccggcgaacatctctgtcaggccgctaatttgcttcagacgcagcacttcatcggcatccatccccagctctttgccgattttctgcggcgtccagccgagccgggtcagctcgcggacgatctctgacatggcgtggatttggtggcggccgcgcgcccggttatggcgtatggtcgctgccatcagcccgtcacgcgaggcagcttcactcgtcaggcaggtcaccggcaaatagccttttagcgtttttttcagcgcggctttgctgcaggccagctcatggcggtgaaaaccatcgacaatcgtatacgcctgtgggccttgctggatgacgacgaccggctgggtaaagccgtcggcctccagcgacgtttgcagcagacgcttctccggcggcgccacgttattcgggttgtagtcgttgggggcgatcagatcctgtttgacccacagcacgcagtcgacgggctgcgagcggaaggggctgtagtggtggagcacctggcgaaacgcgttgatagcctcaatgcgcgcctcgtcatccagcttttgcaggtaagcttccagcgcctgcgtcagttgttgttgcataaaatcccccattgttggcgatgtttttccatgcgtttacggtagcgctgatagtggctgcttttggttgggctaaacgaaagctgacggcaccagtaatcgttattgagcagtactttgcagactcgccgccaggatgggatatctttggtgccaatgtccgcaggttgggtatccggaatatcctccataccttttttctggtaccagcgcaggtagacggcgattttattgcggtagtgctcggcggtggtttccggcatgctgtcgagcaggaacagggcgtagcttttccacgtcaggtggtcgggcttgtcgattttccgatgaccgtagaactgattatcatgcccggcatagaccccgccgctgtgcgcgccgctcactcgctggcacatcgcggcccagcgctcaggttccagcacgtgatacagccacagcccctggcgctgctcgggaccaaacggttcgcaaatgcgcatatagcgcagcggcaccccggcctgatacatcagatcgtacaacgggttatagggctcgccgcttttggcaaaccaggtccagatatcggcggttttccagtcatagagcgggtagatgtaccaggcatggccgcccggcgctgaagtggtccatggtttatcgtcggcgaagcgctgtttacgctgtgaagaaatcgtcataaagcgatttagcgattcgtcggcgcgaatgcccaccagcacggcggcgggacgacgctgcgaaaaccactcggcgaagtggctgacgaaggcttcaaagctcattccgggttgataaaatgaaaaatagcccgggtgggtaatggcccagggcggcggctggcgtacccactcggttccgggctcccagcattgccattgcggcttatactgcgtcagggcattttgggtggtgagcggcagggcgacccagtaaaaggtttcgatgacatccgcatacagcgcacgcagtttttcacagtgggcgatggtgcaggagaactgcgcttcccagtcaataaacaacacgcagatttttttcccctgtaaccgcgccgcctgggcggttaaatgcagcataacggtggagtcttttcccccggaaaaagagacacagatgcgcgaaaaattatccatgacccactggatccgctgctcagttgcttgcagcaccgattccggtaagggatatttaataaacgacatgaccattaatcctttaatagtagaaaattcccgttagctcagtataaacgatgaggggtaggaaattaatggtcgattattgtttctggcagcgggggaacagaagggcgttattcgctgtgattaaatttgggccgtgatgcctctcgatcattcattaatatggtgattaattcagttaaaaaatgattttgcgaagatgcatggtggtaattaatgtagatcgtgatatccggaaaaagattatctatgttgatggcgtgaagctgcatagtgggtgagataaagtcatataaataggaaggcaaaaagccaattaagtcggttttattaatcatgttaagaatggtcataaaagagtcgctgcgaaaggcaatattgcgcggattcagccaggcgatgctgctttgctgcacgcgctgaataacgggatcgttggtaatatagtgagtgaaaaactcctgcgccagtgactctaccgaggtaagcgtttcgcgtcgcggatggcccgcccggcaaaccgccagcgtctgcaccgtctgatagggctgacagatcgtggcgcggttggtaatgggcatgcgggtgaacaccaggtccgcctggcgatacgccagcagctcctcagccgattcggtggtggtcaggttatggtgctcaatttgcaagttcgcctgatgacagagctggttaatcatagcgtggctattgactgaacagaacagcggggggccatatatcacaatacgtttacgcagttctgagcgattattaagattgatggttttttccagctgctccagattttgctgtagatgataatgaagattgacgcaggcggtggtgggcgtcattcctttgccaacacgaacaaatagcggatcgtttaactgctggcgcagacgctgcaacgactgactcaccgctgagggggtgataaataacatcgccgccgctttgctgatgctcaaatgttgatagatacattcgaaaataaccaataaattcaaatcgaactttttcagatcgtaaagatttgccattaatgcagtcctgtttattaccggtgcggattataatattcttaatgataatgttttgtggcttaatatttgcggtgtgaatttaattattggcaaatacagttaagttctgcttaatatatcttatcgtcgacggtggcgccagcggtcgcttccgccaggcgccattgcgggatggaattactctttttcacccatcataatatgcagtttctctttatccggtaggccgaccacctgctgcagcatattatctttattcatataataaatcgccggcgtcacgttggctcccagatcgtccatcagctgctggttgacgttgagcattttcattttctccggcggaattgctttcgggatcgtcagagccattttcccattcgattgctcgtaatcatgccaggttttcgccggatcgctgctggcgagaatcgccgcggcggtggccgggctctccggcttaatcacccccaccagcagagtgcggatctgcactttaccggcctctacccaggggcgggattgctgccagaactgcttgcagtagggacagaagggatcggcaaagacatacagcacgataggggcgtccttgcgaccatcctgcagccagtgggcgctggccatcttcttccacatctcttgtcccgccggggtatagagttctttctgaaacagctgctcgctgaggttgctgccgttctcatcatacatatagccggagatcgcgtgtttaccatccggcgttaggtagatggcgacccccatgtcctggtatttgcccagccagcctttcattccccccggcgcctcaaagggttttataatggtaatgccctgtttttcaatcgcttttaccggagcggggagttcctccgcatggctgcataacggcaaaaggctgagtaacagaagacgctttaacataagtattccttgtaaaatcagcaggaaagggcaaaacgattgtcgaacctatcacagtcataggcaagatcagcagaatgacggattgccctttgctggcgtgggtgatgtaatcctagatgctgttacattaaggtaatgtagagcgcaacacatagccagtctgactggcgctgaacctaccctcgggtatttcaggtaacggggccgcctgaaaaggtggcctttttacttttgtcgcggcaaatgatgcgaaaaacagcgattagcgctgaacgcgtcgacaggttcacagagttgtcttgttccggttgttagataacgcttattgattcgataatgtaaacgcattggtcgggtcaggaaaaattcgttaacttagacctcaacgaaaacacggaggaagtatagatgtccttaattaacaccaaaatcaaaccgttcaaaaaccaggcattcaaaaatggtgaattcatcgaagtcaccgagaaagacaccgaaggccgctggagcgtcttcttcttctatccggctgacttcaccttcgtctgcccgaccgaactgggcgacgtggctgaccattacgaagaactgcagaagctgggcgtagacgtttactctgtgtctaccgatacccacttcacccacaaagcgtggcacagcagctctgaaaccatcgccaaaatcaaatatgcgatgatcggcgacccgactggcgccctgacccgtaacttcgacaacatgcgtgaagatgaaggtctggctgaccgcgctaccttcgtcgttgacccgcagggtatcatccaggcgatcgaagttaccgctgaaggtatcggccgtgatgcgtctgacctgctgcgtaaaatcaaagcggcgcagtacgttgcttctcacccaggcgaagtctgcccggcgaaatggaaagaaggcgaagcgacgctggctccttctttagatctggttggtaagatctaagtctgtttgtgcccggcggcgctacgcttgcacgggcctacaacatcgtaggccgggtaaacggcgtgccacccggcaatcaatgggcgctttcgcgcccattttattccaacaccatgatgcaagcgcattcaggcagcctgacgaggccgcttgcatgatgatgttttaagcccaggagataacaatgctcgacaccaacatgaaaacccagctcaaggcctaccttgagaagctgaccaagcctgttgagctgattgccacgctggatgacagcgctaaatcggcagaaatcaaggaactgttggctgaaatcgctgaactgtcagacaaagtcacctttatagaagacaacacgctcgcggtacgtaagccctcgttcctgattactaacccaggttccgaccagggcccgcgttttgcaggctccccgctgggccacgagtttacctcgctggtgctggcgctgctgtggaccggcggtcatccgtcgaaagaggcccagtcgctgctggagcagatccgcgatattgatggcgatttcgaattcgaaacctactattcgctctcctgtcataactgcccggacgtggtccaggccctgaacctgatggcggtgctcaacccgcgcatcaaacacacggcgattgacggcgggaccttccagaatgagatcaccgagcgtaacgtcatgggcgtgccagcggtgttcatgaacggtcaggagtttggtcagggacggatgacgctgactgaaatcgtcgccaaagtggataccggtgcggaaaaacgcgcagcggaagagctgaatcagcgtgacgcttacgatgtactgatcgttggctccggcccgtccggcgcggcggcggcggtctactctgcacgtaaagggattcgtaccggcctgatgggcgaacgcttcggcggtcaggtgctggataccgtggatatcgaaaactatatttcggtgccgaaaactgaaggccagaagctggcaggcgcgctgaaagcgcacgtcaatgactataacgtcgacgtgatcgactcccagagtgcgaccaaactgacgccggcggcgacagagggcggcctgcatcagatcgaaaccgcctccggcgcggtgctcaaggcgcgtagcgtcatcatcgccaccggggcgaaatggcgcaatatgaacgtgccgggcgaagatcagtatcgcaccaagggcgtgacctactgccctcactgcgatggtccgctgtttaagggcaaacgcgtagcggtaatcggcggcgggaactccggcgtggaagccgccattgacctggcgggcgtcgtagagcatgtgaccctgctggagtttgccccagagatgaaagccgaccaggtgttgcaggataaagtccgcagcctgaagaatgtcgacatcattcttaatgcgcagaccacggaagtgaaaggcgatggcagcaaagtcaccggcctgcagtatcgtgaccgggtgagcggcgatgagcatcatatcgcgctggcggggatcttcgtccagattggcctgctgcctaacaccacctggctggaaggcgccgttgagcgcaaccgcatgggcgagatcatcatcgatgcgaagtgcgaaaccaacgtcaaaggcgtgttcgccgcgggcgattgcaccaccgtgccgtacaaacagattattatcgcggcaggggaaggggcaaaagcgtcgctgagcgctttcgactacctgatccgcacgaaaaccgcataacaagtcagacaatagacctgcataacaaagaggctacccaggggtagcctctttttttatactcttttcgtcattcttacctgacgaccattaccgggatatgggcatggcggatcacgctcgaggcattggagccgagcaggtgggtactgatggagggattgcgtgagccaataactaccacgtcggcgttaatttcgctggccagctcgttgaccatatcgcgaacgctgccaaaacggacatgtagcttgatacgagacgggtcaatgctgaagtggctgaccatcgtctgcaggcgagtctccgcctcatgctgcagatgttcctcaaaccgccgcaggtcggcggtaaaacggctcatggtaaagctcgcggaacccggtaagacgtggagcagatggatcaccccgtcctgctgggccagaaactccgcgtgccggacggctttatcgctcagcgccatctcaaagacatcaaccggcataatgatagtcttatacatatgcaatcctccttgttcgtttgcgtctatatcaacatattatatgcggatattgtgtcattcaggtcgcaaaactgtcagccaggcaggcgcaaagcgtaaaaaagggtaagcggcgggaaaacagcagaaagaggatgtgcggacatcctctgaataaagcgcgaaacgcctcaggcagcggaattagcggtggaattcgccagcggcttccggctggtacaatagctccagcacttccaggtgcgtcgatgcgccgcccggcagctcccagtgaatggtgctgccgactttcaggcccagcagcgcggcgcccaccggcgcgaggacggagagctggctggcgctgtcggtgacctgtgacggaaacaccagcgtccgcacgcgctcttcgccgctggttaaatcgcggaattttaccctgctattcatggtgacgacatcatgcggcatcgcttccggggccagcatttgcgcgcggtcgagttcctcattcagggcatcggcaaccggtgagttggcgaaagccggctgctccagcagcctgtcgatacgttcggcatccagttcattaatgatgattgcgggtctggtcattgcatactccatgttatccaggaacctgtccgtaaaagaaaaccctcgccgaaaggggcaagggttaaggtcctaccatcatactgagagttgccggcagtttgaagtgatgaaacgcacattcagcgtgcaacaccatccggcggacggtgttttccaatcagcatcccgctttgcgctagtggccaaccttatcgaggataaactgtgcgccgcagttacccgggtgaggctggggcagaaaagcggaagtggccagcggggcgttgatggtcgcggcgttgagcgagatttgcatctccgtcagataggccggattaccgttgcaggttagcttaaacgccttcacgctctgcggaccccaggcgcgggccacggcggcgtcgaagtcggcgcggctgaccgtttggccatagtgcttcgcgagaaaatcccccaccgggctgcgcttaatttcaccgtttagtcgcaccatggcgccaaagtagctgtcgggatcgaagccgaagcagacgccatgtttggcatattcgtagcgttccagacaggaggtgccgcccgatcccggcatcacattattaagtttattggccatctccagcgacagcccggtctccgccgcctggcatttgcggttcgcttttacctccggcatgttaggcaccggacgcgtggcgcaaccgtagcgcatccagcgacgttcatccactccgcgcgcggcaatggactttggcagcccgggccacaggccatgcacggtcagaaagtcggctttattcgcggtgtcctgctgcaggcgacactcttccggttcgttgcgattgcggtcatacatgctctgacagaatccggtttgccaggagagggcaaggacgtagcggtcaaaatcagcgtatcgcatcgcggtgagcggttcagcaccggcctgagtggcggtaagcacaagggcaatcgcggcgaaatccttcctgaacatttttattcctgattatggatggcaaaagataacggggagttattaaagcataaaaaaggcgcccgctggcgccttttcgcgtggttagaccattagtggagcgcgctgccgggcaccaggatttcagtagcaacgatcaccaccagcaggccaacgagcaccggcactgaggtgcgcttgaccacttcgaatggggaaatcttcgccatcccggcaacggcgaccaccaccccggagacgggcgatatcgtgcggccgaggttagaagcctgcagcatcggaatcgacaggtaggccggattaatgccggaggagtgcgccagcttggggatcatctcaacgaaggcgtagaacggggcattaccggaaccggtggtcatcgccgccagcatggtcaggatcaccagcaccagcatcagaataatactggccgagccgaaggaggtggcgattgagatcagaccgttgataaagccgatagtgcttaacccctgggcaaagacgccggcggcaaccaacagcatcactacgccggcgaaggcgtcggccattccacggtaggcgacttccagcccgctaaagacgtttttggtgttgaaaccgcgcaggaactcgagtatcgccgccagcagcatgcagccaacgaggatggtgataatgtgcagctccggcccccatttaccgtcaaagatcagcacgccgatgatcggggtaaacggcagaatggcatacagcgccggggcggtggtggtgatgtcgttgacatcgagcatctcgtgagaaatgtgttcttttttatcaagatagcgctgccagaaaaaatgggcgattgccatgcagataatggccgcgatggagatcggcagcgtggttttaaaagcaaagtcgatcagcggcatttcagcggctttggccgccaggacgacgtcacccgaggtcggcgagaggataatcgccgccggtgaggcgcagatggcggcggcggccccgcggctgataccgacattcaccattaccgggaacagcgtcgccatcagcagtacgccaaggccggtcgcggaggagacggccagcgacatcaggcaggcgacaaaataggcggcaatcatcagcagatagggcgaattaatatagcgcaacggcttcgacgctaatttgaccaccatatcattggcgccaatatgggtcatataggtggcgaagccgcacagcatcatgatcatcatgcccagatcgccgccgcggctcatgagtagaatcttaatgtattcaataatatcggtagcggaataaccggtgctcgcggtattacccggtaacactttatgtcccagcagggcgctgacgatcagtaagattaagcctccgacgaacagcaccccggtggccgagtagcctttaatgatatagcgggctacgcccacaatgaccacaatccctatcaggatctcaataaacgtcagcatttattacccctaaacccaaagaatatgtagataaaaagcaccacaccaaattttaatgtgcgaatgtgccgaaaaaacggacaaaactcgctgatgcaaatcaataaagcgataagaactacacgtcccccatcacgcctggatataatcaccagatggatagttaagccgttctgatggacagcgggcgaaaatcaggagtttgccttatttcgttcaacctgcattgagattatctttgctattttaggtggtttttaaatcaaagtggtaatagaaaagtgttgatgttacgtcgtttttcattgttttctcttggttttttaggatggttattggtgtccggaaacgccagcgcgtcgttttcatcgacccttagcgaaggttaccataccttaagtaataacgtagcgcagacctggaatgagccggagcactatgatttgtacgttccagccatcacctggcatgcgcgctttgcctatgacaaggaaaaaaccgataagtataacgaacgtccgtggggggcaggtttcggcgtctcgcgctgggatgagaaagggaactggcatggcctgtacctgatggcgtttaaagactcttttaataagtgggagcccatcggcggctacgggtgggagaaaacctggcgcccgctgacggaccagaatttccacctcggccttggctataccctcggcgtcacggcgcgcgataactggaactacatcccgattccggtgatcttgccattggcgtcaataggttacggtccggcaactttccagatgacctatattcccggcacctacaataacggtaacgtttacttcgcctgggcgcgcttccagttttaattcgctaaatcttagcaataaatgagataagcggaaggtcttgtgcaaaaacaaggactaaagcgttacccactaaaaaagatagcgacttttatcactttttagcaaagttgcactggacaaaaggtaccacaattggtgtactgatacccgacacagcattagtgtcgatttttcatataaaggtaattttgatgtctaagattaaaggtaacgttaagtggtttaatgagtccaaaggattcggtttcattactccggaagatggcagcaaagatgtattcgtacacttctctgcaatccagtccaacggtttcaaaactctggctgaaggtcagcgcgtagagttcgaaatcactaacggtgccaaaggcccttctgctgcaaacgtcatcgctctgtaagcaacgcgtcagtagaatataaaaacccgctaataagcgggtttttttttgcctgtctccttcgcttttagcggctggccgcctgcgagaaaagccagaaggcgagcgccgtcatcgcaaacgaacccagcaaattcaccgcgacgttgagcagcgcccagcttacccggccctgctgcaggagaaacaccacttccgcagaaaaggtggagaacgtggtcaggccgccgcagaaaccggtggtaatcagcagtttccacatcgggtcaataccggtcagacgattaaaccacgccagcccggcgccaatcacaaaggcgcctaacaggttggccgttagagtcccaatcgggatagcatgatgcacaggattgagcttcatgccgagccaccagcgcaatacgctgccggtgccgccgccaataaaaacggcgcaaagaagttgaaacacggtcgtttcctgctatttgatgtaagagagtgtcaagtgtagcgcgcatcgggcgcgattggctatccataacctgacgggagaagaacatgcgggtagcggcaggacaatttgccgtcacgccagtatggcggacgaatgcgcaaacctgtgtggcgatgatgcagcaggcggagcgagaaggggcggcgctgctggtgctgccggaggcgttgctggcgcgggatgacaacgacccggatctgtcagttaaatcggcccagccgctggatggcgcatttttgcagccgctgttggctgagagcaggcgtaacagcctgaccacggtcctgacgctccatgtgccgtcaggggaggggagagcgaccaacacgttggtggtattgcgggaaggcgcagtgattgcccattatcataaacttcatctatatgacgccttcgcgatgcaggagtcccggcgggtggatcccggtcagcagatcccgccggtgattgaggtggcgggattacgcgttggcctgatgacctgctacgatcttcgctttccggaactggcgctttcgttggccctgaatggggcacagctgctggtgctgcccgctgcatgggtgaaagggccgcagaaagagcatcactgggcgacgctgctggcggcacgcgctctcgatactacctgctatatcgtggcggcaggcgaatgcggaacgcgcaatatcgggctgagccgcatcgtcgatccgctggggaccactctggcgggggccgggagcgagccgcagctgatctttgccgatctctcagcggatgaccttgcgcgcgttcgcgagcgtttgccagtgctgcggaaccgacgatttgcgccaccgcaattattatgacgtttttttaaacaaggcttgattcaccttgttacagattgctattgtgtccgcgcgtcaaatacccgtattgtttatcccaataattcgctgtgcacgtcaggatggacatctcagcgctcactcccggaggggaggctatgggccgaaacacgcagcccacgcacaggtggattacaataggacggataaatgcgtgtatgatggcgtattcgcagcttgtatagagaagaaggttagctatgggtgagattagtattaccaaactgctggtagtcgcagcactgattatcttagtgtttggtaccaagaaattacgtacgctgggcggcgacctggggtcggctatcaagggctttaaaaaagccatgaacgaagatgacgatagcgcgaagaaaaccaccgcagaagaagaagcgccggcgcagaagctctctcataaagagtaattctccggctgcgtctcctgacgggatgctggcggtacggcgaagaggccgcgacgtttatcgttgcggcctttgtcgtttttgtcgacgccgcggagaaaagatgcaactaactgttacggacaggcgaaacggatgaagcggagagagccgctgcgccgaaaaggcgcgcagcggcggaagcggtgggttatttaacttccatccctttagcctgcaggtcggcatgataggaagagcggacgaagggaccgcaggcggcgtgggtgaagcccatcgccatcgcttccgctttcatctcttcaaactcttccgggctgacgtagcgctgcaccggcaggtggtgacggctcggctgcagatactggcctaacgtcagcatggtgacgccatggcgacgcaggtcgcgcatcacttcgatgatctcgtcgttggtttcgcccagacctaccatcaggccggatttcgtcgggatctccgggtgcgcttctttaaaacgctccagcagcttcagcgaccagttgtaatccgcgcccggacgtacctgacgataaagacggggcacgttttcgaggttatggttgaagacatccggcggggtcaccgtcagaatatcaagtgcgcgatccatgcggccgcggaaatccggaaccagcgtttcgatcttaatcgacgggtttttctcgcgaatggcgctgatgcagtcggcaaaatgctgtgcgccgccatcacgcaggtcgtcacggtctaccgaggtgactacgacatagcgcagacccatatcggcgatagtttgcgccagcttttgtggctcgtttgcatctggcgcgaccgggcgtccatgcgcgacgtcgcagaacgggcaacggcgggtacagatcgcgccgaggatcataaaggtcgcggtaccgtggttgaagcattctgcaaggttcgggcaggaggcctcttcgcacacagagtgcaggccgttcttacgcatcgctgctttgattccctggatacgggacgagtctgccggaagtttgattttcatccattccggttttctgagcagagcttcacgctcagttgccacgtttttcaccgggataagggccattttatcggcgtcgcggtacttaacaccgcgttccatcacaatgggtttactcatagcgtgcgtgttccagttgcgagtcacgaaggaaagcgaattaattcaatgaaatgttgcaattatcaactatttttgaatcaagagcaggcagtataccattgaaaaggggcagaaagcagcctgcctgcccggcaaattgtaaaatagttgttgttttatccttttcccttccgtgcgctacgccttaaacgagcggatcaccgtctcgatgatctctttcagcaatggctctttcccgctcagcttattaaagtgcagcgcaacgtcaatctgctctccacccagggaagggaaatccagggtctgcagcggccagagacgggacaccatggcgaacaggcgttcggtggtcagacccagcatatcgctcccggcgatcatcgccgcctgggtcatcaggttaaaggtgctaaagccgcagcggcgctcgcccatctcttcctgtagtcggcgatggagggtggggtagcgctggccttccggcagcagcagcgcaaattcgtactccgcgagggtcgtttcatcctgcggaccgtccagggcgggatgccctgcgcggcagtacatctgtacccgatcctgatacagcacatgatggcttatcgcctggccgctgtgcaggtgggtatcaatgagcagatccacctggcgctggtcaagctgccgcgcggcgtcgacgatggcgatattgtgcaacaggatctgcgggaaggtcggcttcagcgcgctggccaggccaggcatcagcagcgctcccatcgctggcgtagtggcgatagtgatcacgcgctgctggtgcgggctaccggtgatatccagcgcgctgaggaaagcttccatgccgcggctgatgtattgatgaagatgggtggcataggcggtgggggtgacgccctgtcctttgcggataaatagcggatcggggaacaacgcccgcagtttgttaattgactggctaatcgccgagggtgtgatattgagtatcttcgcggcgttgacgatacctttatgtacgtataccgcttcaaagatcgtcaacagattgaggtcaatattacgcaggatgcgaaacatttgacgatcgtaacgttcatcctgtctgtcaggagattctgacggaggcgtattctctggcacgcgatgagtccggttgggaatgataggccaagtatagcggcccaccgcgttgccgtgcgtgacaattgattgcaaaaataacgtgttactcgtttagcgccccgctgacagcgggacgttggcctgccgcttaatcccggggaagatattcgtgtggtggatgatttagcagcgccagcagattggcgaccagtcgcggagcgaccgtctccggggaggctgccggctgccactggcgcatttgcgtcatctccataccggcatagccgcaggggttgatacgcaaaaacggtgtgagatccatggcgatattaagcgccagaccgtggaaagaacaacctttacggatccgcaatcccagagagcagattttgcgttcgccgacatagacgccaggggcgtcggcgcgggggtgcgactcgatactatattcagccagggtattgacgaccgtttgctccagtagcgtcaccagctcccgcacgcccagcttacggcgcttgaggtccaacaggacgtacatcacctgctgtcccggaccgtgataggtgacctggccgccgcgatcgctctggatcaccggaatatcgccgggcaccagcacgtgttccgctttgccggcctgaccctgggtgaatacggggtgatgttccaccagccagatctcgtcgagggtatcttcatcacgggcgtcggtaaattcatgcatcgcctgcgagacgggttcgtaaggttgcaggccaagctgccggataagaattttattgtgctgcaaaacaacatctccgccgggaagagagaattcaggttggggagtatatcacagccgtgcagaagggaatgagaagacccggcacggcggccgggtcagggaaaaggttacagcaccatccgaacgatatcgatattgcctaactcttcgtacagcgtttccacttgttcaatgtgggtggcgttgatggtgatggagaccgagtggtagttacctttgctgctcggttttactgacggcgagtaatcaccaggcgcatggcgctgtaccacttccaccacctgatcaaccagctccggcaacgcctgccccattactttgtaagtaaatggcgtagggaattcaagcagttcgttaagtttggttttcatgtcagctccggtgttacgacaaaataataactcccaccaagggcgggagttatcaggttacttggatgaatagtatatggggatggaaatcacactttcaagtgttcgatttttaaccaaaccagtggtggaacattaatttaatgtaatcaataattttgccgaagaaattaccttccggaatttcctgcaggaccaccagcggacgctggtcgatggttttaccatccaactggaagttaatggtgccgacaacctggtttttctgcagcggggcgtgcagctcagtgttattcagcacgtagctggctttcagatctttcattcggccgcgcggaatggtcaggtagacgtctttatccacccccagcgaagcgcgatcgctgtcgccgaaccaagccggttcagaggcaaactctttgccagctttaatcgggttgacggtttcgaagaagcggaagccccaggtaagcagttttttgctttctgactcacggcctttgaacgtccggccgcccattaccgcggagatcaggcgcatctggccttcggtggcagaagcgacgaggttgtaacccgctttgtcggtatggccggttttgatgccgtcgacgttcaggctgttatcccacagcaggccgttacggttcagctggcggatgccgttgaaggtgaactctttctcacgatagatggagtactcgttcggtacgtcgcggatcagcgcctggccaatcagcgccatgtcgcgcgcggagctgtactgtccgtcagcatcaagaccgtgaacggtctggaaatgggtgtttttcaggcccagagcgtttacgtagttgttcatcaggctgacgaaggcgtcctggctgccggcgacgtagtcggccatcgccacgcaggcatcgttaccggactgtaggttaataccacggatcagctgagaaaccggcacctgcatgcccggcttgaggaacatcagagaagagcctttgaaaaccgggttgccggtggcccaggcatcgttgccgacggtgaccagatcggactctttgaatttgcccgctttcatcgcctgaccgataacatagctggtcatcattttggtcagactggccgggtcgcggcgggagtcggcattgttttcagccagtaccttgccagagttgtaatcgataaggatccaggattcggcgtcaatctgcggggcgcctgggatcatcgttttgatattcaggtcatcggcgcgggcagcggaggagagcgctgcaacggagagcgccgtaatgagtaaacgagcggtgaaagaggtcttcatggtcagaacaacggcatccgtgatggagttaaaaaagtgccttactatagcaaatgctctgcgggccagcatccgacattgcgcatgagtttgttaatgacttttacatgcgcgaggtgaacgggcggcccacggcgtttagttggcgcgagtaataaaggactgcagctgcgcttcgctttgcaggcgctgctgcacggcgctggcctgtgctttatcagcaaagggacccagctgaatacgccagaccgcgccgttttgcatgacccggcctggcacagaaaactgctggctcaggcgctgctgatactgctgcgcccgcgactggtcgcttactgcgcccacctggacaacaaaattaccgctggcgctggaggtcgcggaggacgaggccgccacggcgccagcggctgcggcgatggccgcagcgggcgccacattaccctgaatggagccaggcgcggtcactggcgctgttggcgtggcgccggcggcaggagccgtcgcggcggctgccgctggttcgctactctccagcacgccgttgttcaggggcgtcggcgcgccgaggaaaccgccgctgttcaccggcgcgcccacgctgtctgccggcgtcagcgtgctgttgctgatcgggcgaacgtcagtgggcgcgggctggctcatgccagcggcgtccccaccgtccagattcggacgggcgggcagggcgtaagtctgtttggcgacggtggtacaggccatccccgggccggaaagcgaaccgtcaggcgcgacgatgatggggtcgatgcgcactttggtgttgttggaggtgttcaggcggtcagcggatgcgcgggaaagcgagatgacccgatcgttgccatagggaccgcgatcgttaatccgcacgacgatcatccgtccgttggcaaggttagtgatccgcgcgtagctcgggatcggcagcgtcgggtgcgctgcggtcaactgagtcggatcgaaggcttcgccgctggcggtcaggttgctgttgggttcagcgtcatagatcgccgcgaaaccggtctgagtaaagttggccggatcctgaacgattttgtagcttttaccgtcgcgctcataatcctgattcgccgtggcgttcggcgtttcatactgcggatcggcgccgctgatctcaaccgtcgggccattacagacggccggctgtggagtactgacagttttttgttgcacgtcatcactcgaacatgccgccagcagccccgctgctatgcagatccccagccattgcttacgcattgctaacccctttaaacgcttttcgacaacatttttctgtgggtatggatcgacattacgataccaaacccggccatcagtacgatcagggcggagcccccgtagctcaccagcggcaacggtacgcccaccaccggtaaaataccactcaccataccaatatttacgaagacataaacgaataaaatcaacattaaaccaccggccatgacccggccaaaggtggtttgcgcctgggcggcgatccacagtccgcgcataatcagcagaatataaagcgctagcaggatcagtacgccaatcaggcccagctcttcggcgaggacggcgaagataaagtcggtgtggcgttccggcagaaactccagctgcgactgggtgccgtgcagccagcctttgccgcgcagaccgccggagccaatggcaattttagactgaataatgtgatagccggcgcccagcgggtcggtttccggatcgaggagcatcatcacgcgctgacgctgatagtcgtgcatcaggaagaaccacaggatcggaataaaggcggcgaccagcaccacggcgataccaatcaggcgccagctgaggccggagaggaacagcacaaacagcccggatagggcgatcaggatcgaggtcccgaggtcaggctgcgccgccaccagcagcgtcggcaggaagattagcaccagggcaatgccggtgttcttcagcgacggtggacagacatcgcggttaataaaccgcgccaccatcagcggcacggctattttggcgatctccgacggctgaaagcgcacaataccgagatccagccagcgctgcgcccctttggagatggcgccgaaggcgtcaacggctaccagcaggatgatacagaaaatatagaggtagggcgcccagccttcatagacccgcggcgggatctgcgccatgacgatcatgatcaccacgcccatggcgatctggccgattttacgctccatcatgccgacatcctgaccgctggcgctccagataaccagcgcgctgtaggtcagcagcgccagcaggataagcagcatggtggggtcaagatggattttatcccatagcgattttttgttcggattatccgtcattattgatcctcccctgcggtaaccgccgggttttcgcttggcagcgtagtgttgttatcgcccagcatgatgtgatcgaggatctggcgcataatcgtaccgaccgccgggccggcgccgccgttttccagaatcatcgccacggcaacctgcgggttgttataaggcgcaaacgctgtcatcagtttatggtcgcgcaagcgctcggagatccggtgcgcgttataggtttcgttggccttcaggccgaacacctgagcggtacctgacttggccgcgattttatacggcgcgctggcgaagtatttgtgcgcggtgccgttgccgcggttggccacgccgtacatgccgtctttggcgatttcccaatagccggaatggatatcgcctaccggcggctcatggggctggacccagggtacgggcttgccgtcttccacggtgctctgcagcagatgaggcaccttcaccacgccgtcgttaatcaggatcatcagcgctttgttcatctggatcggcgtggcggtccagtaaccctggccgatgcccaccggaatggtgtccccctggtaccagggtttcttaaagcgcttgagcttccattcgcgggtcggcatgttgccagagcgctcctcggagaggtcgataccggtgtagtggccgtagccaaacttgctcatccactctgagagacggtcgatgcccatgtcataggcgacctggtagaaataggtatctgcagactcctcgagcgctttggtgacgttcagatggccgtggccccactttttccagtcacgatagcgtttctctgagccaggcaactgccaccagccggggtcgaagaggctggtgttgcgggtgatcaccccggcgctcagcgccgagacggcgacgtacggtttgaccgtcgacgccggcggatagaccccctgcgttgctcggttgaccagcggtgtgttcgggtcgttgagcagcgcggagtaatctttgctggagatgccgtcgacgaacaggttcgggtcatagctcggggttgaaaccagcgccagaatagcgccggtacgcgggtcggtcaccaccacggcggcgcggctgccggccagcagcgtttcaatatactgctgcagcttgaggtcgagggtgaggtagatgtcgcgtccggcctgcggaggcacctctttcagctgacgaatgacgcggccgcggttgttcacttcaacctcttcgtagccggtctgaccgtgcagaacgtcctcgtaataacgctctatacccagcttaccaatgtcgtgcgtcgaggcgtagttggccagcttgccctctttatccaggcggtcgacgtctttatcgttaatttttgagacatagccaatgacgtgagtcagcgccgaattataggggtaataacgacgcttgtagcctttgacttccacgccgggaaagcggtactggttgacggcaaagcgggccacctgcacttcgctgaggttgacctttaccggaatcgaggtaaaacgatgggagcgggcgcgctcctttttgaaaccggcgatgtcatcgtcagttaaatcgacgacgtcgcgtagcgcatccagcgtctgctgtacgttatcgactttctccggcatcatctccagctggtaaatggtgcggttaagcgccagcggggtgccgttgcgatcgtaaataatgccgcggctcggcgggatcggcaccagcttgatgcggttttcgttcgagcgcgtctgatagtcgtcgaagcgaacgatttgcacattgtacaggttggcgatcagaacgccggtaagcagcaaaatccccaaaaaagcgaccagcgcccggcgcacgaacagcgaggattcagccgtatagtcgcggaaagaattctgtaatttcattcgctgcttagtctaccctgatcatcattactcacggtggtacgggtggttggtggtgatgctccacgcccggtacagactctcggccaccagtacgcgcaccagcgggtgaggtaaggtgagggtggagagcgaccaactctgttccgccgctgctttacaggcgggagagagaccttccggaccgcctaccagtaaactgacgtcgcgcccgtcctgtttccagcgttccagttcgcgcgccagctgcggtgtatcccatggtttacccggaatatccagggtcacgatgcggttcttaccggcagcggctaacatcatctcgccctctttttcgaggatgcgtttgatatcagcgttcttaccgcgcttaccggcagggatctccaccagctcgaacggcatatctttgggaaaacggcgcagatactcgctaaagccggtctgtacccagtccggcattttggtgccaacggccaccagctgcaacttcacgcattaactccagagtttttccagctcgtacagacgacggctctcttcctgcatgacgtggaccatcacgtcgccgaggtcgacgacgatccagtcggcggcggcttccccttcaacgcccagcggcagcatgccggcggcgcgggactcctgaaccacgtggtcggcgatagacatcacatgacgcgtggaggtgccggtgcagataatcatgcaatcggtgatgctggatttgccatgtacatcaatggcaacgatgtcctgacctttcaggtcatcaattttgtcgataacaaaatcctggagtgctttaccctgcaagtgttccccctgggtgcgtgaagattgataatcataaagagcctgacagtatacctgaactgatgaaaaagtcgggtgaaatgtctgtcggcaggcgttcgtggcgggctatcatcccatccctcgccgcggattgcatcgccatttttgtaaaacaatttctgcaaaccggctttggcggatgctgcctggcagcggagaataacagcctgctctggcctgtcaatggtctggcgggaattcttcttgcggccgccagacggcctggctatttaatacccgcagggtggtgaaatcgtcgcggatttcgaggaggctccaggcgccatgggcaatgggaaagtgccacatcgccgccgcaggcatctgcaacagcagggcggtcagcaggctcaggacgccctgatggccgacgatcagcagatggtcaagatggcggcagtcggtcagcgttgggataaactcgctgacgcggcgggcaaaattctgaaagctttcgccgttggtgggggccgcatgctgccagtcggcacaccaggcggcatagttttccgcatcttctcgctggaggtcgcgatgatgacgcatctcccagtcgccgaaaaacatctcattgagcgcgggatggcgctcacgcggaatagcgcggtcgccaagcagcagatcggccgttgtcccggtccgcgccagctcgctacagaatactttatcgaaaggcgccaggcgcagtcgttcgccgagcgcgcgcgcctgagcgacgccgcgcggcgtcaggggcgttggggcatggccgctgtataacccggcaacgttggcttcggtttcgccatggcgaactaaccacaatttcatgaacaggctctgacaggcgatgaagagatggcgttacgatagcgcttttttcgcgccaggcccagcctggggtcagcaatagagtccctgctcgcggatgtaatccagcacggcggcgggcagcatctcggcgcaggactcgccgcgctcaaggcgctggcggatgatcgtcgcggaaatatcgaaccacggcgtctcagccaggtagatcacgccggaagggcggttatgcagagactccacgtcgtgggttaaatggcgatccagccagcgctgatccgcttcctgcgccatggtcagcgggtaacccgggcggcggcaaacaatcaggtggacattgtcgagaatggtttcatagttgtgccaggtgggaaaggtcagtagcgaatcctggccaatgataaacgccagcggtttgcgcggtccctgctcctggcgccactcctgcagcgtttgcgccgtccaggagggggtatcgcgccgtagttcgcgttcatcgagcgtgaacagcggtttatcggcaatcgccagcttcagcatgtgcacgcgctgggcgctggtggcttccggctgcggccggtgcggcgggacgttgttaggcatgatgatgaccttgctcaggccaatctgattcgccaggatctcaaccggcttgaggtgaccgtaatgcaccggatcgaaggtgccgccatagattgcctgtaactgagtcatatcaaccatcaataaaaacgtccgccagggctttgtggcagagcaacaacgaaagactttccagttcgggccagacgtcgtgcccgtaatcctgtttaaaggtgagctccgcgcgggtcagaagggtcaccgcctggcgtagctgttccccgctcaggcgcgtgagagcgtcgctgagcagctgacggcggttttgccagacccgatgtttatcaaacagcgagcgcagcggcgtgtgcgtcgcctggcgcttgagggtaaccagcagcagcagctcccgctgcagagtacgcagcaggatcgccggctcgcagccttcaaggcgtaactgctgcaggacgtgcagcacgcgcttacttttgcctgccagtagggcatcgacccaatggtaaggcgtaaagtgcgcggcatcgtttaccgcttgctcaacgcggggcagggttagcttaccgtccggccagagcagcgccagacgctccagcgcctgcgccagcgccagcagattgccttcgtaacagtagcacagcagctgactggccgcgtcgtcgagctgcagctgatgctgtttggcacgggcggccagccagcgcggcagctgcgcgtattccggcgtctggcaactgacctggacggcgcgctgagccagggcggtgagccatgcggcattctcctgggctttggtcagcttatttccgcgaactatcagcagcaggtcgtcgtgcagcaggccaaccagcgtggcgagctgttcattgatcgccgcgttggggccgttttccggtaggatcaacagcagggtttgccggctggcaaacaggctcatcgcctggcttaaggcgaaaatcgcctgccagtcggtgctgttgtcgattgaaaaagtatggtgctcggtaaagccctgcgcggcagcagcttcgcgaatggcgtcctggctttcctgcaacagcaggggatcgttgccaagcagcagataggccgcgcgcagcccttcagtgagctgcgcgcggagctgttccgggtacaaccgaatcatcattgacccagcgtggtggagacgcggttacccgaggaagccggcgccgcgctgctggcgaccggtttctcttcctgctgggttgcttcaacatccgctacctgaacgcttggcagcttacgaatcagctgttccgccgctttgtcgtacatttcctggataatcatatcctgctcggcgtctttcgctaatgccgcctgcgggttatcaaagaacgaccgatagaccttggtggtaatcggatagatatcgtgacccgggatcaggacgctggcatgaacggtcatgaccatctgatactccgccgtacgaccatcctggaacaccgatgcggtatctttctgaatcgacgagccatcgaggcgcagagaagggacatctttacgcagcgtgctggcgtcgatcagttccacgccgttaagacgcagctgattacgtaccgcgcggcttaacgggccgttcggatcgctcgactggaaaatcatggttttcatggtggcgggcaccttggtagtgctacgcaaatgccagccacagccggcggtgacgagcaccgccagagataacaacattgttaccagatatcgcacgcttcctcccgcgcttagccaacgaccagattgagcagtttacccggaacgtaaatcactttacgcacggttttaccgtcgagatatttcgccaccagatgttcctggccggcgcgctcgcgaacctgctcttcagttgcatctaccgcaacggtaattttaccacgaactttgccattgacctggacgacgacgagggtgctgtcttccaccatcgcgctctcatccgctaccggccacggcgcgttgtcgatatcgccttcgccgttcagctcacgccacagggtgaagctggcgtgcggagtgaacgggttgagcatacgcaccaccgccagcagagcttcctgcatcagcgcacgatcctgctcatcttcctgcggcgctttcgccagcttgttcatcagctccatgattgccgcgatggcggtgttgaaggtctgacgacggccgatgtcatcggtcactttggcgatggttttgtggatatcgcgacgcagcgctttctgatcttcgctcagagccgccacgttcagtgccgcaacctctcctttggtggtgtgctcgtagaccagtttccagacgcgtttcaggaagcggttcgccccttcaacgccagattcctgccactcgagggtcatatccgccggggacgcaaacatcatgaacagacgcacggtatccgcgccgtagcgctcaaccatcacctgcgggtcgatgccgttgtttttcgacttggacatcttgctcatgccggtgtacaccagctcgtggcccgccgcgtctttggccttcacgatgcggcctttttcgtcgcgctcaacgatggcgtcaaccggggaaacccagttacgttcgccgttttcgcccacatagtagaacgcgtcagccagcaccatgccctggcacagcagctgtttcgccggctcatcggagttcaccatgcccgcgtcgcgcatcagcttatggaagaagcggaagtagagcaggtgcatgatggcgtgttcgataccgccgatgtagatatctaccggcagccagtagttggccgctttcgaatccagcatcccttcctgatactgcgggcaggtgtagcgcgcatagtaccaggaggattccataaaggtgtcaaaggtgtcggtttcgcgcagcgccggctggccgttgacggtggtcttggcccattcaggatcggctttgatcgggctggtgatgccgtccatgaccacgtcttccggcaggatcaccggcagctgatcttccggggtcggcagcacggtgccatcttccagggtcaccatcgggatcggcgcgccccagtagcgctgacgggatacgccccagtcgcgcagacggtagttaactttacgctcgcccacgcccatggcagccagtttgtcggcaatggcgttgaagcccgcttcataatcaagaccgctgaactcgccggagttaaacaggacgcctttctcggtcagcgcctgctcggagagatccggctcggagccgtcggcagcgaggataaccggcttaatgttcagaccgtacttgctggcgaactcgtagtcgcgctggtcgtgacccggaacggccattaccgcgccggtgccgtattccatcagcacaaagtttgccgcccagaccggaatttcttcaccggtcagcggatgaatggctttaaagccggtatcgacgccttttttctccatcgtcgccatgtcggcttcggccactttggtattgcggcactcgtcgataaaggtggccagcgccggattgttcgccgcagcctgctgcgccagcgggtgacccgccgcgacggccaggtaggtacaacccataaaggtgtccggacgggtggtgtagacagtcagtttgtcagcgtagtcgttgacgtcaaaggagatttctaccccttccgaacggccgatccagttgcgctgcatggtcttcacggtgtccggccagtggtccagcttatccagatcgttcagcagttcatcggcgtaggcggtgattttaataaaccactgcgggatctctttacgctcgaccttggtatcgcagcgccagcagcagccgtcgataacctgttcgttggccagcacggtctggtcattcgggcaccagttcactgcggaggtttttttgtacaccaggccttttttgtacagctcggtgaagaacttctgctcccagcggtagtattccggggtgcaggtcgccagctcgcggctccagtcatagccgaagcccagcattttgagctggtttttcatgtaggcgatgttgtcgtaggtccacggcgctggcgcggtgttgtttttcaccgccgccccttctgccggcagaccgaacgcatcccagccgatcggctgcaggacgtttttgcccagcatgcgctggtagcgggcaatcacgtcgccgatggtgtagttacgcacgtgacccatgtgtagtcgaccagaaggataaggaagcatcgacaggcagtaatacttctctttgctctcgtcttcagttacttcaaatgtacgattttcgtcccagtgaagctggactttcgattctatctcttccgggcggtattgctcttgcatggcagccagtggtcctgttttcaatacagctacaaagtgtagccaatggatgtgttatttcagatcggcatagcatagcccaaacgcccacgtcaaaacagcttttcgcacatcaacatcggcaaaagctgcgcagattatttcgcgactctgtggcttgtcagacacagcgggagaggaataaggtctattatcagaagacgttaaccccaccggaggcgaaatgatgaacaaggttgctcaatattaccgtgaactggtctcctcgctcagcgaacggctccgccatggagagcgcgatatcgacgcgctggtgacgcaggcgcgggaaaaaatcgtccgcgccggcgatctgacgcagagcgagatcgagtcggtgattgcggcggtcaagcgcgacctcgaggagtttgcccgcagctacgaagagagtcacgaagacgagagcgacagcgtgtttatgcgggtgatcaaagagagcctgtggcaggagctggctgatatcaccgacaaaacccagctcgagtggcgggaagtctttcaggatctgaatcaccacggcgtgtaccacagcggcgaagtggtcggtctgggcaacctggtctgcgagaagtgccactatcacctggcggtatacaccccggacgtgctgccgcgctgtccaaaatgtggccacgatcagttccagcgtcggcccttcgagccctaagcgtgcgaaaaacgatgcgcgaggcttcgcgcatcgtggtttgtcttatttcaccgtgttgacttcggtgctcttgaaatactgttttccacccatgtcgctaacatatttctgcgatgagttcagtaccagcttgtcagcagttaacgtcccgactccgcatttcgccaggcccagtatgccgcaacttttaccaccattgaccactttggtggcggttaacgtcatgttgccgcccgcgctgagggttgaataattgtagatcgcgcctttatttttggtatttaaggtcaggtcgccggtgctgctgatctgcccttcgttggtgatatctgagtaggtcgtgattgaaatatttttggcagtaatattgccataattattcactacgccgtgatcggtggtgatatcggcggcattcatataaccattttggttcagccagtagctgtgggcggtaatggcgttggttgcctcaatacgaccactgctgctttgcgccagcgtgccattggtctgcagattgatattttcgccggtgatattgccgaggttatagatctcgcccgtattggcgctgccgtcctgtgtaagcgactgaatggtggtttggccagtagagttaatattgccggtgtttttaaagctgtcgccgacaaacgtcaggctggtgtgtttggcgctgattttgccttcattgaggaaatcaccgattgccgtggcggcaatctggttatttgacagcagggaggctttttcttcgttgcggattttcccgccgctggtcaggcttaatccactggtgccggtcatcgtgcctgagtcgccgttggtgatgttgccgttagcggtggcaatcagctggccgccggagagagaaccggtgttaacgatataatcgccactggagagcattaaataataggcgccggcgatgctaccgtcattggtgatgcccgtgacggtggaaacctggctcagcaaacctttgcccgttattgaccctttgttcagtaaattaccgttgctggtgagcatcagcgtgccgttggagataatagaacccttattacgtacgccaaagccgatgttattgccgaccatgctgatgctgttggcctcaatgccgccaaggctgctgacgtcgatgctgtactgcgggttaaccgtcatctggatcagggtggcctttttaccggcggaggtcaccgagccagagctgttatccatggtgaagttgcccgcgctgaccagggcgttgttggcctgcactttaccgttaatcttaatcgcgtcggcgagcagaaccgcgtagccgttggcggcgttcatgccattttcgccgatggtgagggtgccgcccgttacggtatagctgccgatggcgccatcgtcggtcatattaaccttgccggtggtcaggatagccttgttggtattaacaaagctacagccggaacaggtgatgccgttcgggttggcgattaccacatccgctttctgaccgttgacttcgataaagcccttcaggctactggcgtttttggaggtcacctcgttcaaaatcaccgaagcgctgccggcggtcagattattgttgcgggcgatattgccaaatgtgctgtggctgacatcatcgccgctgttattgaggatggtgccattggtgccgacgttgaagtcgcggtacaggttatgggagacaccggcggcgttcggcttttcaatatcgataaccgtggcgccggaagagtgcgtatagcttgtggggtcggcataaactaccgacgaggttaatactgccgccagtgcgacataagaagccttaaacttaaacattttctttattcctttaaataatgattaataaataatgtaaatatgacgagtcaataatgtgcgaattaatacctccactgtaatgaaaagcccatattcagggcgtcgctatgaaacttatccggtttactcagcggggtactaataaacagatcgtactgcgttgaccatagctgaccgcgcagcccgctgacggcgccggagagcactttgcctttttgatatagatcggcgccgataagacggcctatatccgcgcccaaatagaattgccgctcgtgggtggccagatcccagataaaatcgttgcgccagtaccatccctgattgccggacaggctgttttcaccgtcaaaaccgcgcacgctccagcgactgccaatattgaatttattatcggaagcgagtttgtccgggctgaactgggcgctgaggcggggagcccaggtaaatttgtcgccggtggcgtcaaatttcatcattgcctgcagattaccatgcacaatccgcgacagcgggctatacagcccggcctgctcttccggcgttgctgtcgagctgagccacggcaggctgcgctggatgccgatgctggcatcaacaatcttgttgttaaagtagtgctggtggttgagggtgaattcccatgaggggttctgcttgcgcatcaccagtagctcactgccgccgaagtaataatgcgaggtactcttggcgatccgcaggtcggcggtggttttttgctgccgggtgtgggagagcagacgactcagcgtggcgctgtagtagcgatttttactcttataatccatcgtcgaccagttgccgttaaactgctgacgatactggctgtatgccccgtaggcgcttagtgtccagtagccaaagggaatggagtaatacaggctgccgttgtggttgccgtcgttatgctgattgaattcaatatcgcctccgccggaaaggtacaggatatcgttgagggtggtcaggtcatagagatagagggccccgccggcctggtagcgtccgctggctttgctgccggcgtcgtcaagccaggcgccaagctgccattttttcgccaggctgcgggcgatctggatatcgctttctccctcgtgctggcccggcagcagtttcatgtgcgcggtggcgccgggcagacgctgcaggttggccatcccttgctcaaggtcgcttaagcgcaggatagtaccggaagaggtgggtagggaattccacaggcgggtggtgtccgagccgtcggcatagtcgatagcgcccactttgccatagtgcagcgtgagcctgagtatgccgtgctccagcgactgggagggcacatcaatcagcgaggtgatgtagccttgcgcgatcagctcattttgcaaggtataggccagcaggcgaatgccttcgctacccagacagcgtccctgcgcctgccgtgcggttttcgccagtaatttccgggtgagcgcctggttatcggagtcgatatcgacccggttgatcaatttgcaatgcgtttcctcaggaaaagggatcccctgcggcgccacgcgctgttgtgaagactgaaaatcctgttgctgcggcgccagcgcctcctggcgggctttatcctgctccgtctggtgagtagaagaggccaatggcgcggccccggcggctgaggtgcccgccagcgtgataaacagcagcccggtgagcgtgcgagatcgaattaacatgaagcaatatccatttgtttcattggtttggtggcgcatccattattctgcgagcggcagagaatattgatggcctttatttcggcgcaggcgaggtcaggcaagaatattatattcaattaataaaataatcgtgcgacgaacctgttacgaggcgttatatgctagcggcggtggcaaggccggtccacgaattcattattgaattctttatgaattgatcgatttaataaataagttcagcttttatcgcccaggtttattgggtacgtaaatgatagtagcgataatccgccgcataaataacattggcgaataatatggcggaaaagattaactgcgcataccgggcggtatgcgcagagaaaaaccattaatggagtattttggcgaggaaatctttggcacgctcggattgcggattggcaaagaaggcctctttatcggcatcctcgacaatcttcccttcatccataaagatcacccggttcgccaccttgcgggcaaagcccatctcatgggtcacgaccatcatggtcatcccctcgttggccagttcaaccataacgtccagcacctcgttaatcatctccgggtcaagcgctgaggtgggctcatcaaacagcatggcgattgggtccatacacagggcacgggcaatggccacgcgctgctgctggccgccggagagttgcgccgggtatttttccgcatgcgccgccaggccaacgcgctccagcaacttgaggcctttcttgcgcgctgaggctttatcgcggttaagcactttgacctgcgccagcgtcaggttgtcgataatcgacagatgcgggaacagttcaaaatgctgaaacaccatgccgacgtgcgagcgcagtttagccaggttggtctttttatcgttaaccacggtgccatcgacaataatctgcccctgctgtaccggctcaaggccgttcacagtcttaatcagcgtggatttaccggagcctgacggcccgcagaccaccacgacttcgccttttttcacttccgtggagcaatcggtcagcacctgaaagtgaccataccattttgaaacgtttttcagggtaatcattacacagtccttttcttcaaccagctgaccaacagcgaggcgctgaggctaatcacaaaatagacgccgcccgcgaacaggatcatttcgacctgggttccgtcacgctcgccaatggtggaggcggtacggaagaagtcggcgagactcaatacatacaccagcgaggtatcctggaacaggacgatcccctgggttagcagcagcggcaccatggcgcggaaggcctgcggcaggatcaccagccgcattgactgccagtgggtcatccccaacgccagcgcggcgctggactggccgcgggagatgctctgaatgccggcgcggataatctctgaatagtaggcggcttcgaacatcgaaaacgccaccatcgccgagatcaggcgaatatccgttttcggcgacagtcccagcacgttctgcaggaagcccgggacaatcaggtagaaccacagcaggaccatcaccagtgggattgaacggaatacgttgacgtaggatttagcaaaccaggccagcggcataaagctggacaggcgcataaccgccagcagggtgccccagacgatgccgaccacgatggcgatcaccgtaatcttaagggtgatcaccagccctgccagcagatagggcatggagggaacgatcgaactccagtcaaaatcgtacattatttgcctcccatattgccaggcaggcgaaccttacgctcgaccacatacataatcagcataatcaccgcgttgatgaaaacataggccagggtgatggcggtaaaagactcccaggcatgagcggagtagtccagcagtttgcccgcctgcgcggccatatcggccagaccgatggtggaggcgatggccgagtttttcaccaggttcatcatctccgaggtcatcggcggcacgataacgcggtaggcgttcggcagcagcacgtagcggtaggtttgcggcagggtcaggcccatcgccaggccggcgttcttctgcccgcgcggcagcgactggatggcggcgcgtacctgctcgcagacgcgagcggcggtaaacagccccaggcacagcatggaggagacaaagaattgaatgtttgggtccagctccgatttaaaccacatgccgatattttccggcaggaactccggcaccaccaggtaccaggtaaagaactgcacgatcagcggcacgttgcgaaacagttcgacatagcaggtgccaatgcccgagaggaagcgattgggtaccgtgcgtaaaatgccgaacagtgagccgacgagaaaagcgatgatccaggccgagatggagagggcgacggtgatttgaaaaccgctccacagccagcccaggtaggtagtgttgccgaagggggcctgttgcaggaatatcccccagttccagtctattgacatacatgactcctggaaaaaaaagggtagccagtgctaccctcgaagacggttgtccagcttgtttcggtattcgcggcggctggggaacgaccagccgccgtatagtctgtccgtgctgtgacaatcatcgggagggcaggatatcccgcccctggttgttataattagttcagtgctttgtcgttaggtgatttgaacagcgctttcatgtcgtccgacagctcgaagttgaggttaagattttttggcggaatcgggtttttgaaccatttgtcaaaccacttctccgcttcgccagaggtctgagcctgggcgacggtttcatcaaccagcgccttgaacgtcggatcgtccttccgcagcatgcagccataggcttccttcgactgcggggtgccgacgatttcccagttatccggtttcttcgccttggcgcgttcgccagccagcagggcatcatccatcataaaggccacggcgcgtccgctctccagggtgcggaaagagtcgccatgatctttggcgctgataatgcgcatattcatttttttctcatcgttcagcttatgcagcaggatctctgaggtggttccggaggtgacgacgaccgctttatccttcaggtccgggaaatctttgatcgggccgcctttcttcaccagcagacgggtaccgaccacgaagatggtatcggagaaggccgcctgtttctggcgctcaaggttgttggtggttgagccgcactcgaaatcaaaggtgccattctgcagcaacgggatacggttctgcgaggtgaccgggatcagtttgacctgcagatcgggtttgttcagttttttcttgatggcatcgacgatggcgttggaataatcctgagagtagcccacaaccttctgctggttatcgtagtaagagaacgggaccgaagattcacgatggccgacaacgataaccccgtttttggcgatcttatccagggtgttctggccagccgccggggcagcatcttccgcctgcgccagaccagcggtcattcccattaccagcattgccgtggccagtttacgtaattgcatatccaactccttatccgcagcgtcagcgacgctattgatacccattgtgattgtgtgtgttgttattgggggcacgcatccacgtgccgcatttgtatgtgtttgttagcatttagtttggcttaatgtaaagattttgctgctttattgtttatttttgcgaagcgctccgcaccaatcggaggcaaatatcttccattgcaccaaaatagcgcgaccaccgatcgtttctggtgcaacccggttgcactgggtcggacgatgccgctaccaggttaaataaagcaatgactgtgccagagtggcagatgatgggaagaaaaagccggcgacgggcgtcgccggcggagaaacttatcggcgacgctggcgcaggctcatcagcagcgcggcgaaaccaaacagcgccgtcagcgcccatagcggccagttgccggtgcgggcgtaaggggttaagccgctggtgggggtcacggtggtggtcaacacctcgcgggtaaactgcgggatcatcttctggatctcgccgcgcgggccgatcaccgcagtaatgccgttgttggtgctgcgcagcagcgggcgggccagctccagggcgcgcattcgcgccatctggaagtgttgccacgggccgatggacttgccgaaccaggcgtcgttggagatggtcagcaggaagtcggtgtccggccggaagttatcccgcacctgttccccgaggattatctcgtagcagatggccgcggtcagcttcaggttatgcgccatcagctgcggctgcacgtaggggccgcggctgaaggaggacatcggcaggtcaaagaacggcgccagcggacgcagaatcgactccagcggtacaaactcgccgaacggcaccagatggttcttgttgtagcggttggtcgagtcgtagcggtacgggttatctttgccgagagtaatgatggtgttgtaggtatcgtaacggttctgcttgttgagacgcgcatcgacaatgccggtgatcagcgagctgtcttttgcgcgcagcagatcgtccatcatgctgaggaactgctgctggttgatctccagatccgggatcgccgattcaggccagataatcagctgcgagtggccgatatgcggctgggtcagcgccaggtaggttttcagggtattgaccagctgcttttcgtcccatttcatggcctgtgggatatcgccttgcaccagcgagacctgggtcgcgcgcgccggcagcagctgataccactggatatagcgcagcgggaacggcagggcgaacagcagcgcggcaatcgccagcggcttccagttgcgctggacgagagccagggccagcaggccgctgactaccatcagcaggaagttaatcgcctcgacgcccatcaccggcgcgaggcctttcagcgggccgtcaatctggctgtagccgaactgtagccacggaaagccggtcagcacccagccgcgcaggaactcggtgatttgccagacgacaggggcagcgatagccatccgtatccagttagttttaggccacagacgggcgagcaggccggcaaacaggccggtgtagagcgagagataggccgccagcagaacgacgaggaagacgttaaccgggccgggcattccgccaaactgcgcgatgctgacatagacccagttgatacccgtgccgaacagcccgagtccccagaaatagccgatcccggcgctttgcagcgggcgtcggttgagggttaacgcctgcagaccgatcagcgaaacgatagccgctggccagaagtcataaggtgaaaaagccagcgttccgctggctccaaacaacagcgccagcaacagacgtatgcgctggcgttcaagaagagaggcaaataccatttaggttaatcgtcccgttaattaacgcctgctgctacaggctattctttttgccagccggacgcggggcacctacaaccgtgtatgactcgcggtctcccggctggccatttcagcgctaccgcttactcttccagcttcggctggggagcgtcatcgggcagctttacatgcacctgaatgatacgacgactatctgccattgctaccttgaattggtaaccatcaatgtcgatagattcgccgcgggccggcagatggccgaaggcctgcatcaccagcccgccaatggtatccacttcttcatcgctaaagtgcgtgtcgaaggcgtcgttgaagtcttcgatggaggccagggcgcgcaccgtccaggtgtggcggctcagctggcggaaatcgatatcttcttcttcgtcgtactcgtcttcaatttccccgacgatgagctcaaggatatcctcgatggtcaccaggccagagacgccgccgaattcgtcaataacgatcgccatatgatagcgctgtgagcgaaactctttcagcatgcggtcgacccgcttgctttccgggacgacaaccgccggccgtaacactttttccatgctgaaggcttcggcgtcgctgcgcataaacggcagcagatccttggccatcagaatcccttcgatgtgatctttatcttcactgatgaccgggaaacgcgagtgggcggattcgatgatgacatccaggcactcgtccagcgtctggttgcgtttcagggttatcatttgtgaacgggggatcataatgtcgcggacccgctggtcggcgatatccattaccccttcgagcatgtcacgcgtatcttcatcgataaggtcgttttgcccggaatcacggatcagcgccagcagttcatcgcggtttttcggttccccgtgaaaaagctggctgagtaacagggagaaaaatccctttttgctgtttactgtgtcactactgtgtgaattgtcgtcgctcatggcgtcgtttgggttctcatgttgatttaactgtcgctcgtcgcgcgtaaactcagcgccggacggcatgggttgcctgactttctggcaggtaaaacgcagaaacagcggccggatgaggcgcaagcaccgccatccggctgggcgctattccgcaatcttctcggaaatgtacgggtcctcatagcccagagcaagcattatctctgtttcaaggccttccatctcttccgcttcgtcgtcttcgatatgatcgtagcccagcagatgcaggctaccgtgcaccaccatatgcgcccagtgcgcctccagcggcttaccttgctcgctggcttcctgctctaccacctgacggcagatgatcagatcgccgagcagcggcatttcaattcccggcggcgcttcaaacgggaaggagaggacgttggtcggcttatccttgccgcgataggtcaggttcagctcatggctttctgcaacgtcgaccagacgaatcgttaactctgactcctcctgaaacggcggaatgacggcgtcgacccagcgttggaaaagggcttcgtccggcaggccgctggtctcttcgcaggccagctgtaaatcgaggatcacctgactcatttttgctcctgttcctgggcttcgcgtttgcgctcggcggccagctctgctttacgtttctggtctgcggcttcccatgcctcataggcgttcacgatgcgggcgaccaccggatggcgcaccacgtcttcgctatggaagaagttaaagctgatctcatcgacttccgccagtacttcgatggcatggcgcagaccggatttggtgctgcgtggcaggtcaatctgcgtgatgtcgccggtgatcaccgccttggagttaaagccgatgcgggtcaggaacatcttcatctgttcgatggtggtgttctggctttcatcaagaatgataaaggcgtcattcagcgtccgtccgcgcatataggccagcggggccacttcgatgacgttacgctcaatcagcttctccactttctcaaagccgagcatctcaaacagcgcgtcatacagcgggcgcagatacgggtcgaccttctggctcagatcgccgggcaggaagccgagcttttcgcctgcctcgacggccggacgggtcagcagaatacggcggatctcctggcgctccagcgcatcgaccgccgccgccactgccagataggttttacccgtacccgccggacccacgccgaaagtgatgtcgtgatcgaggatattggcgatgtactgcgcctggttcggcgtacgcggtttgattaccccgcgcttggtcttgatattgacggctttaccgtactcaggcacgctttcggcgctctgctccagtacgcgcgcttccttgatcgccaggtggatctgctctggttcaatatcctgaatctgaccgcgcattggcgctgtgtcgacatacaggctgcgcagaatatcggcggcagcgtgcacgcacagggcgcgaccggtcagcttaaagtgattgtcacggcggttgatctcaatgcctaaccgacgctccagctgtttaatgttgtcgtcaaacgggccgcacagggctaacaggcgtgcgttatccgctggctccagggtaatctcacgagtgtctatgttcaaactattcctctttacgcaggtggccggacgcggcgcgtggccggctaatcaggaaattatttacgtcacaggaaaatggcgcaagcattgctgtagatatagggacggagagaggaattacaaggcctgccggaaccgacaggcctgaagggatcatggctggtaaattcccacgccaagatcgttctctttacgggtgcgggcaatcactgattcgggtgattcagcgatacgcagacccatctccgcttcggtgcgcacgattttaccgcgcagcgagttggtatatacatcgacgatttcgacatcgacaaacttaccgacgaggtccggggtaccttcgaagttgaccacccggttattctccgtacgtccggagagctccatgatgttcttacgcgaggtgccttccaccaggatgcgctgtaccgtgccgagcatgcgacggctccaggccatcgcctgctggttaatgcgttcctgcaggatatacagacgctgttttttgtccgcctccggcacgtcgtcgaccatatcggccgccggggtgcccgggcgagcggagaagataaagctgtagctcatatcgaaattgacgtcggcgataagcttcatggtcttttcgaaatcttccgtggtttcgcccgggaagccgacgataaagtcggagcttatctgaatatccgggcgcgcttcacgcagcttgcgaataatcgctttatactccagcgcggtatgggtgcgtcccatcaggttcagcacacggtcggagccactctgcaccggcaggtgcaggaagctcaccagctccggcgtatcgcgataaacgtcgatgatatcgtcggtaaattcgatcgggtggctggtggtgaagcgaatgcggtcgatgccgtcgatggcggcgaccaggcgcagcaggtcggcaaagctgccggtggtgccgtcgtaattctcaccgcgccaggcgttaacgttctgccccagcagattgacctcacgcacgccctgcgccgccagctgggcgatttcaaacaggatatcgtcgcacggacggctaacttcttctccgcgggtatacggcaccacgcagtaggtgcagtatttattgcaaccttccataatcgagacaaaggcggtcggcccttcggcgcgcggctctggcaggcgatcgaatttttcaatttccgggaagctgatatcaactaccggactgcggttgccgcgcacggagttaatcatctccggcaggcggtgcagggtttgcggcccgaaaataatatcgacatagtgcgcgcgctggcgaatatggtcgccttcctgggaagccacgcagccgccgacgccaataatcaggtccgggttcttctctttcagcagcttccagcggccaagctgatggaaaactttttcctgggccttctcacgaattgagcaggtattgagcaacagcacatctgcttcttccgccacttcggtcagttgatacccatgtgtcgcatccagcagatcggccatctttgatgaatcatactcgttcatctgacagccccaggttttaatatggagtttttttgtcattgacttgctcatgctcagtaatagatatccaaaacgcggggatatatacagggtgaatttcgcattccagggcgcgtattgtaatgctttggtcgccccctgaccagtgcgagcgttatcgccgcaagagggcgaaaaatccggtaaacttaacggattctgctttaaggataatagccatgacaattcacgtaacagatgtcgccatcgtgggcggcggcatggtcggcggcgccctggcgttagggctggcgcaacagggatttaccgtgacggtgcttgagaaagcggcgccaccggcgttcgatccggcatccgccccggatgtgcggatctcggcgatcagcgcggcttcggtcggcctgctgaagagtctcggcgtctgggatgccatacgggcgatgcgcgtccatgcttatcgccgtctggagacctgggagtgggagagcgcgcacgtcgccttcgacgccgcggagctcaagctgccggagctgggctatatggtcgagaacaaggttctgcaatggggcctgtggcaagcgctggcggcgcatgaggcggttaccctgcgcgtcggtagcgaactgaaaacgatgcagcgcggcgagatgcagacggcgttgcatttgcgcgagggggagacgatccacgcccggctggttatcggcgccgacggcgctaactcccaggtgcgggagatggccggcatcggcgtgcacgcctggcaatatcagcagtcctgtatgctgatcagcgtcgaatgcgccgacgatcccggcgacagcacctggcagcagtttactcccagcggcccacgcgccttcctgccgctgttcgaccactgggcttcgctggtctggtacgacgccccggcgcggatccgtcagctgcagagcatgaccatggcgcagctccagcaggagatcgccagtcactttccggcgcggctggggcaggtgacgccgcaggcggccggcgccttcccgcttacccggcgtcatgcgctgcagtatgttcagcccggcctggcgctggtgggcgatgcggcgcacaccattcatccactggcggggcagggggttaaccttggctatcgtgatgtcgatgccctgctggagatcctggcggaagcgcgcggccgcggcgaagactgggccagcctgccggtgctgaagcgctaccaggcgcggcggcgagcggataattttatcatgcagtcggggatggatctgttttatgccggtttcagcaatgacctggcgccggtgcggatgctgcgtaatattggcctgatggcggctgaacgcgccggggtgctgaagcgtcaggcgctgaagtatgccttaggcttgtaaaaccggcttcccgggcaggggcgtagcggagagcgcctgcccggcagtcaggacggagtaagcatgtcaggacgccaatagcaaaaaagcccaccgaagtgagcttttttgcattgaagtggctggggtacgaggattcgaacctcggaatgccggaatcagaatccggtgccttaccgcttggcgataccccaattgtctgttgcgcttgaccgtaactacaccggttgagggcaacagtgcgttcactgctgaacgacttttaaatttggctggggtacgaggattcgaacctcggaatgccggaatcagaatccggtgccttaccgcttggcgataccccaacaaattgtttgcggatttatcgatgcatatcgatacgtccagaatttggtggctacgacgggattcgaacctgtgaccccatcattatgagtgatgtgctctaaccagctgagctacgtagcctaattgtcttactgcttcttcgatggctggggtacctggattcgaaccagggaatgccggtatcaaaaaccggtgccttaccgcttggcgataccccaataccgtcgcggtgaaccgcaaatatcgaagaaatatggctggggtacctggattcgaaccagggaatgccggtatcaaaaaccggtgccttaccgcttggcgataccccatccgtacaacgctaactggtgaatggtgcgggaggcgagacttgaactcgcacaccttgcggcgccagaacctaaatctggtgcgtctaccaatttcgccactcccgcaaaaaagatggtggctacgacgggattcgaacctgtgaccccatcattatgagtgatgtgctctaaccagctgagctacgtagccatctttttttcgcgtaaccttatcggcgttgcggggcgcattatgcgtattgggcctgcgagcgtcaacctctttttcaaggaaaatcgttgtaatgtgactgtttggttaggttgcgaacagctcgctggaatattcggcaattattggttatttatcgtttttcagcggtataaatccggcaaaaagaaaacggaccccggagggtccgttttgcgtttcaccgcccgtctgggcttatttgtaggccgactggtggacaccgaccgcgcggcctgatggatcgttcatggttttgaacgcttcatcccactcaatggctttcgctgaagagcaggccaccgacggaccgccagggacgcactccgccgcgctcggcagcgggaacagctcttcgaagatctcgcggtacaaatagccttctttggaggtcggcgtgttgtacgggaagcggaagcttgcggtttccagttgctggtcgctgatctgtttggcggccacttctttcagggtatcgatccagctgtagccgacgccgtcagagaactgctccttctggcgccaggcgacgctggccggcaggtaggattcaaagcattcgcgcagaatgtgtttttccattttgccgttgccgcacatcttatcctgcgggttaatgcgcatcgcgacgtcgaggaacttcttgtcgaggaacggcacgcgggcctccacgccccaggcggacatcgctttgttggcgcgggcgcagtcaaacatatgcagcgcctgcagcttacgcaccgtctcttcgtgcagttctttggcgttcggcgccttatggaagtagaggtagccgccgaacacttcgtccgaaccttcgccggaaagcaccattttgatgcccatggctttaattttccgcgacatcaggtacatcggcgtcgaggcgcgaatagtggtcacatcgtaggtttcgatgtgatagataacgtcgcggatggcatccagcccttcctggacggtaaagtgaatttcgtggtgcacggtgccgaggtggttggccacctcctgcgccgctttcaggtcaggagagccttccagaccgaccgcgaaagagtgcagctgcggccaccaggcttcgctacgctcctgatcttcgacgcgacgggcggcgaatttcttggtgatagccgagatgaccgatgaatcaagaccgccggagagcagcacgccgtaaggcacgtcggacatcaggtggcttttcaccgactcttccagcgcctggcgcagctcgttcttatcggtaacgttgtctttcaccgcgtcgtaatcaaaccagtcgcgctgataatactggcggatttcgccgtctttgctccacaggtagctgcccgccgggaactctttaatggtgcggcataccggcaccagcgctttcatttcggaggcgacatagaagttgccgtgttcgtcatggcccatatacagcgggataatgccgatatggtcgcggccaattaagtacgcgtctttttcgctgtcgtacagggcgaaggcgaacattccctgcagatcgtcgaggaactccgggcctttttcctgatacagcgcgaggatcacttcgcagtcggaaccggtctggaactggtagcgatcgccatactccgcgcgcagcgcctggtggttgtagatctcgccgttaacggccagcgcatgggttttttcggcgttgtacagcggctgggccccggcgttgacgtcgacaatcgacaggcgctcgtgcgccagaatcgctttgtcgctggcatatacgccagaccagtccggaccgcggtggcgcatcaggcgggaaagctccagcgcctttttacgcagctcgcctgcgtcagttttaatatccagtacgccaaaaatagaacacatagccttctccattaccctgtcgtgtttgatgttgtgctggcttcgtctcgtggcgaagcctgagtgcgtgcttaagaaaatgccgtaaagggggagcaggcgcaagggttttgcggccggaaaaagaaaaaacgcaaccgtgattgttgaacagtgaaaaaagagtatcttttgaacggctttattgaggaattcgtatttataggccgtttttattagatggggtaattctgatgggcgctagaaatgaaaaaccacgtcctgcgacgtggttggcatcagaaaatatcgatttccgcgacggaagggtaaatccacgacgggcggaacggcatgctgtcgatgtcgtcgagggtggagacgccggagagcaccagaatagtctccagccccgcctggaaaccggccagtatatcggtgcgcaggttatcgccgacgatcaccgtctgctcggagtgagcctgcattttattcagcgctgaacggatgatccacgggctgggtttgccgacgtaaaacggcttacggccggagatcttctcgatcccggcgcacaacgcgccgcaggcagggtagaagccgcgaccgtgcgtatccgggttagtggcaatgaagcgggcgccgttggcgacgaagaaggcggccttatgcatcatttcccagttaaaggagcgagtttccccgacgatgacaaaatccgggttcacatcggtaatggtaaagccggctttgtacagctcgtggatcagcgccccttctcccaccacgtaggcttttttgccttcctggcgacgcagaaaatcggcggtggccatcgctgaggtgtaaaaggcgctatccggaacatcaattccagcggtggcgaaacggttcgccagatcctggccggtttgcgacgggtagttggtcagcattaccagcggcatgcctttatcgaggatgcgcttgataaactcggctgcgccgggaacggcgacgttatcgtgcatcagtacgccgtcaatatcacaaattatgttttgaatggtcatggtgggtccagaatcattaacaaagacgaaactatacgcgtcatcgatgaggtttcacacctctgacgggcgaggcccgcccgtattaaggtgacgcgctatgagaaaaggggcgattagctctcaagcaaacgctgcagcagcgtgccattgagcatggcgcgtttgaccagcgcgaaggcgccgattgcagagcggtgatcgagggtggagcgcaccaccggcaggttcttacgaaacgccttaagcgcctgggcgttaatgcagccttcgatggccggaagaaggaccttttcagcttccactatttcgccggcgacgacgattttttgtgggttgaacaggttaatggcgatggcgatcgttttcccgaggtggcgccccacgtactcaatcacctcgcaggccagggcatcgcccttgttggccgctttgcagatagttttgatcgtgcagtcatccggcgtcagacggctctggtagccctgctccagcaggtggcgaacccgctgttcaatggcggcattggccgcgacggtctccagacagccgaagttgccgcagtggcagcgttcgcccagcgggtcgacctgaatatggccaatttcgccgacgttgccgttgcggccgataaaaatgcgcccgttggagataatccccgccccggtaccgcggtgcacgcgcaccagaatggagtcttcgcaatcctggcttgcgccaaaatagtgctcggccagcgccaggctgcggatatcgtggccaacaaagcaggtaacgttgaagcgtttctccagcgccccgaccaggccccagttttccaccgcaatgtgaggcatatagcggatcacgccgctttccgggtcgacgaggcccggcaggatcactgagatagcgatcagctcgcgaattttgcgctgacagttttcgataaaggtggcgatgatattcagcagggcgtgttccagcgtttcctgggtgcgctcgggcagcgggaagtgctcctcttccaggggcttgctgcttaaatcatacagggtcagagtggcgtcatagcggccaagccgcacgccgatggcgttgaagttgcgggtttctgcgatgatagagatagcgcggcggccaccggtggaggcctgctgatcgacttctttgatcaggccgcgctcaataagctgacgcgtgattttggtcacgctggcaggggcaagctggctttgttcggctatctgaatgcgcgagatgggcccatgctggtcaatcaggcggtacacggccgcgctgttcagttgttttacgaggtcaacgttaccaatttgagcttgtccgcctgctgtcatacttttacttactcagtgacgacctcgttaccattaacgatggtcttggtgattttataatcgcgtgtaaaggcggtcaggttagcgaccatgcccggcgcaatgctgccgagctgcttgtccacgccgatagcgcgcgcaggatagagcgtcgccatgcgcaatacttcgtccagtgccacgccgcaatgctcaaccagattacgcaccccttcaatcatggtcagggaagatccgctgagggtgccgttttcatctacgcacagcccattgcggtagtatattgttttcccggcaaaaatgaactggtcaatattcgcccccgccggcgcggtggcgtcggtgaccaggcacagcttgtcgcctttcaggcgcttggcgttgcgcacgttggcgtaatcgacgtgcatcccgtcgacgatgataccgcagtagacatccggctcgtcaaaaatcgccccggcaagacccggttcgcggccggtaatgtacggcatcgcattatacaggtgggtggcaaaggtaatgcccgcgcggaagccgactttcgcctctttcagcgtagcgttggagtggcccgcggagacaacgatcccggcggcgaccagtttgcggatcacttctggctcaacgcgctcaggggcgagggtcactttggtgatcacatcggcgttgtcgcacaggaaatcgaccagcgccgcgtccggtttacgcacgtagtccggattgtgggtgcctttcttaacgatattcagccacggcccttcgagatgcaggcccagcgcctggttcggatgtttttgcagatattcgcgcatcacgcgcacgccttgcttcatcagatcgtcgctggaggtaattagcgtcggcaggaagctggtgcagcctgagcgttcgttggccttctgcatgatctccagcgtttcgacagtgaccgcctctgggctgtcgttaaactgcacgccgccgcagccgttgagctggacgtcgataaaaccgggggcgattattgcgccgttgactgagcgctgctcgatgtcagacggcaaatctgccagcggacaaagacgttcgataaagccattagcgataacaaccgcatggtcatcgagaatttcatgaccggtataaacccggccctgggttaatgcatacattacgacccccggtatatacgcctcatcaggtcagcgttcgttcgtttgccgccggcatgatggtgcgtacaaagaaaaagatgatcccgcgccagggcgcgggaaggactacattacagacctttaatattttcagcttctaattcgttgaaatatttcagcgtcttcactttcagctccatggtggacggttcgtcgcagacgatcaccgccttcggatgcagttgcagacaggtaatggtccacatgtggttgacgttaccttctaccgccgcctgcagcgccagcgctttctgatgacccagcaccagaatcatcacttcttctgcgtccagcagggtgcccacgccgacggtcagcgcatatttcggcaccagatccacatcgccgtcgaagaagcgggagttcgctacgcgggtttcatgggtcagggtcttaatacgggtgcgggacgccagagaagaggccggttcgttaaacgcgatatgaccatcgttgcccacgccgcccatgaacaggtggattttaccgtaggaacgaattttttcttcatagcgacggcattccgcatcgatgtccggcgcgttaccattcagcaggttgatattttctgccggaatatcaacgtggtcaaagaaattacggtgcataaagctatgatagctttccggatgctctttcggcaggccaacgtattcatccatgttaaaggtgacgacgtgcttgaagctaacctggcctgctttatgcatttcaaccagcgccttgtaggcggtcagcggggtaccaccggttggcagacccaggacgaacggacggtccgcggttggtttaaatgcattaatgcggttaacgatatggcgggcagcccatttaccgacctgctcagcggttaccaggggaatcagtctcattcttcacctctatagtcaaagtagattctggcggattggcgccagcactctaaggagagtattgcagcaactgcgccgaccggggtcaatccgtgttgatttttttaatgataaaataagttttcgttgttagccagtgcaagggaggagggaatacgatatttggtgataattatcacaaaaaatacccgtttaatttgcgatacgaattaatttttcacacactttgccggtaagtgataaaaccgaccttgttacacaataaaaaagtggctttgaaatgagcctcatcggggtctcatagggggaataagatgaatattttaggtttctttcagcgactgggtagggcgttgcagctccctatcgcagtgctgccggtcgcggcattgctgctgcgtttcgggcaaccagacctgttgaatgtacccttcatcgcgcaagcgggtggggcgatcttcgataatctggcgctgatcttcgcaattggtgtggcatcaagctggtccaaggataacgccggttctgcggcgctggccggtgcggtagggtatttcgtgatgaccaaagcgatggtcaccatcaatccggaaatcaatatgggcgtgctggccggtatcattaccggtctggtggcaggggcggtatacaaccgctgggccggcatcaagctgccggacttcctgagcttcttcggcggcaaacgcttcgtgccgatcgccaccggcttcttctgtctgatcctcgcggcgatcttcggctacgtctggccgccggtgcagcacgctatccactctggcggcgaatggatcgtctccgcaggggcgctgggttccggtatctttggtttcatcaaccgtctgctgatcccaaccggtctgcatcaggtgctgaacaccatcgcctggttccagattggtgagttcactaacgccgctggcgctgtgttccacggcgacatcaaccgcttctacgccggcgacggcaccgcggggatgttcatgtccggcttcttcccaatcatgatgtttggtctgccgggtgcggcgctggcgatgtatctggcggcgccgaaagcgcgtcgtccgatggtaggcggtatgctgctgtccgtggccatcaccgcgttcctgactggggtaaccgagccgctggaattcctgttcatgttcctggctccgctgctgtacctcctgcatgcggtgctgaccggtatcagcctgttcatcgcaacggcgctcgggatccatgcgggcttctccttctccgcaggtgcaattgactacgtgctgatgtacagcctgccggccgccagcaaaaacgtctggatgctgctggtgatgggcgtggtgttcttcttcgtctacttcctgctgttcagcgcggtgatccgcatgttcaacctgaaaacgccgggtcgtgaagacaaagccgctgacgtggtaacggaagaagccaacagcaacactgaagaggggctgacccagctggcgaccagctatatcgccgcggtgggcggaacggacaacctgaaagccattgacgcctgtatcacccgtctgcgtctgaccgtgggcgattcggcgaaggtgaacgacgccgcctgtaaacgtctcggcgcgtccggggtggtgaaactgaataagcaaaccattcaggttatcgtcggtgcgaaagcagagtctatcggcgatgagatgaaaaaagtggttacccgcggcccggtagcggcagcggcaccggctggcaacgtcgccaccgcagcgcccgcggctaaaccgcaggcggtagcgaacgcgaagaccgttgagtcgctggtttcgccgattaccggtgacgtggtggccctcgagcaggtgccggacgaagccttcgccagcaaagccgtcggcgacgggatcgcagtgaaaccgaccagcaacatcgtggtggccccggccgccggtaccgtggtgaaaattttcaacactaaccacgcgttctgcctcgaaaccaacaacggtgcggaaatcgtcgttcacatgggtatcgacaccgtggcgctggagggcaagggcttcaaacgtctggttgaagagggcacggacgtgaaggcgggtgagccgattctggaaatggatctggacttcctcaacgccaacgcgcgctcaatgatcagtccggtcgtctgcagcaacagcgatgactacagcgcgctggtgatactggcgagcggtaaggtcgttgctggccagacgccgctgtatgagattaaaggcaagtaaggctcctgagtcgagtttttgcctcagcggcgaagggaaaccttcgccgcttttttttccagcaatcggccccataatcctcttctgatacctattttacgtaactaatagttgtcactacgccctgcttgtaagatcatgtgccgttatacgttgtttacgctttgaggaacccgtgatgagtgaggcagaagcccgcccgactaactttatccgtcagattattgatgaagatctggctaccggtaaacataccaccgttcacactcgcttcccgccggagccgaacggttatctgcacattggccatgcaaaatccatctgcctgaacttcggcatcgcccaggattatcagggccaatgcaacctgcgtttcgatgacaccaacccggtgaaagaagatatcgaatacgttgagtcgattaaaaacgacgtgcagtggttaggtttccactggtccggggacgtatgctactcgtctgattatttcgatcagctgcatcagtatgcggttgagctgatcaacaaaggtctggcctatgttgatgaactctctcctgatgaaattcgcgaataccgcggcaccctgaaagcgccgggtaaaaacagcccgtatcgcgaccgcagcgtggaagagaacctggcgctgtttgaaaaaatgcgcagcggcggcttcgaagagggcaaagcctgcctgcgcgcgaagatcgatatggcgtcgccgtttatcgtgatgcgcgatccggtgctgtaccgcattaagttcgctgagcatcatcagactggcaacaagtggtgcatctacccgatgtacgacttcacccactgcatcagcgatgcgctggaaggcattacccactcgctgtgtaccctggagttccaggacaaccgccgcctgtacgattgggtgctggacaacatcagcatcccggtgcatccgcgtcagtacgaattctcgcgcctgaatctcgaatacaccgtgatgtccaagcgtaagctgaaccagctggtgactgagaagcacgtggaaggctgggacgacccgcgtatgccgaccatctccggtctgcgtcgtcgcggctacaccgccgaatccatccgcgagttctgcaagcgcatcggcgtgaccaagcaggacaataccatcgagatggcgtcgctggagtcctgcattcgtgaagatctgaacgaaaacgccccgcgcgcgatggcggtgatcgatccggtgaaactggttatcgagaactatccgcagggcgaaagcgaaatggtggtgatgccgaaccatccgaacaagccggaaatgggcagtcgtgaagtgccgttcagcgccgaaatctggatcgatcgcgcggacttccgcgaagaagccaacaaacagtacaagcgtctggtgctgggtaaagaagtgcgtctgcgcaacgcctacgtcatcaaagcggaacgcgtggagaaagatgccgaaggcaatattaccaccatcttctgcacctacgatgccgacaccctgagcaaagacccggccgacggccgcaaggtcaaaggcgtgatccattgggtaagcgcggcgcatgcgctgccggtagagatccgtctctacgatcgtctgttcagcgtgccaaacccgggcgcggcggaagatttcctcgcggtaatcaacccggaatcgctggtgatcaaacaggggtacgcggagccgagcctggcgcaggccgaagccggtaaagcttaccagtttgagcgtgaaggctatttctgcctcgacagccgctatgcaaccgcaaccaatctggtgttcaaccgcaccgtcgggctgcgtgatacctgggcgaaagcgggcgaataacatttcttttcttgtcaaagcgtcgctcccagcggcgctttttttgtttcagaatcagctaattaaacttttcattttcgcgatgcgaattaattctgtttctgcgcggtaataaatagcgcttctgatgtttcctgtcacatacaaaaaaccaatgtaatcgctttcaatgattgcgtttttccctgattttgcaatgacttccataacaaaatcatcagagataagactgtaacaaaacgacataaaatatgtgcgctttgtcataatcttaagctttgcctcacgaaaaacattgataattcgcgtcacgaaaaatagtctatctacagtggttttgcggtcttttttaccgccccacattttgcagttttatttattttttagcgattgaccgctggtcttcgccttttaaaacgtcaaagaggatatgcacatgcgtacgtttagtggcaaacgtagtacgctggcgctggctattgccgccgtcaccgcgatgtcgggctgggttgtggctccacaggccagcgcagcaggctttatcgatgattcaaccttaaccggcggtatctattactggcagcgtgagcgtgaccgtaaagatgtgaccgacggcgacaaatacaaaaccaacctttcccactctacctggaacgccaacctggacttccagtccggctatgccgccgatatgtttggccttgatattgccgcgtttaccgcgattgaaatggcggagaacggcgatagcggccacccgaacgaaattgccttctcgtcacgtaacaaagcctatgacgaagactattccggcgataagagcggcatcagcctgtataaagccgcagcgaaattcaaatatggtccggcgtgggcacgtgcgggctatatccagccaaccggccagactctgctggctccgcactggagttttatgccaggtacctatcagggggcggaggccggggctaacttcgactatggcacggcgggcgcgttaagtttctcctatatgtggacgaacgagtataaagcgccatggcatatcgagatggacgatttctatcagaacgataagaagaccaaagtcgattatctccactccgtcggcgctaaatatgatttcaaaaatgacctggtgctggaggcggcatttggtcaggctcagggctatatcgatcagtactttgctaaagccagctacaagtttgacgtcgccggcgcgccgctgagcaccagctaccagttctacggcacccgcgataaggtcagcaacggcggggtcaacgacatctatgatggcaccgcatggctgcaggcgttaacctttggttataaggtggcggatgtcctggatctgcgtctcgagggaacctgggtgaaggctgatggccagcagggctacttcctgcagcgtatgaccccgacctacgcctcttccaatggtcgtctcgatatctggtgggataaccgctccgactttaacgccaatggcgaaaaagcggtcttctttggcgcgatgtatgacatgaaaaactgggatatgccgggctgggcgttcggcgcgtcttatgtctacgcctgggatgcgaagccgggaagaatgtcctctccggatgcgtactatgaccctgactatcgcctgaaagagtcggcctatagcctggatgcaatgtataccgtacaggaagggcgggcgaagggcaccctgttcaaactgcactttacccaatacgacaaccattccgatattccgagctggagcggcggctacggcaacatcttccaggatgagcgcgacgtgaagttcatggttatcgccccgttcactattttctgatgcctgcgcggcgggcgtgagcctgccgcacctctgggagaacgacaatgaaaaaaatgctgcttattgccatgatggcagcgggcctggtggcctgcaccacgtcgccggcgccgaaagaagacaccaaactgaaagatgcctatagcgcctgtattaatacggcggaagggaatccggacaagattgaagcctgccagagcgtactgaatgtgctgaaaaaggataaacagcaccagcagttcgccaaccaggagagcgttcgcgtcctggattaccaacagtgtattcaggccacccgcaccggcaacgatcaggcggtgaaagcgcgctgcgatcagatctggaaggagatccgcagcaataatacgacccattaaatcagacgacagcggcaaacgggcggggcatatctccgcccgtttgtttttttagcgctgactctccgccggctgatagccgcggctcagccgcacgaacagtagcgcggtggcaatgaatccgcacagcgcggcgcacattagccaccagcccggcgcgcttttatcgccgctgagctcgaccagggcgatggaaatagctggcgtcagtcccccgaagatcgcggtggcaaggctgaaggccagcgaaaagcccacggtgcggacgtataccggcataacttcggtaagcgccgcgaccatcgcgccgttatacatgccaaagaagaacgagaaccatagcaggaccagcgtcatacgggtgaaatcgggcgcgacggtgagccagtgcatcaccggccaggtggtgagcagcgccagcacggtaatgcccatcagcaccggacgacgaccgattcggtcagagatcgccccgctggcgaagttccatatcaactctccggacaaagcggggatgaggaaagtcaccccaggggcgtgagcgggaagggtgccagaggcgcccataaaaaagccaaccggcaggttggcttttcagtctcagcgaagcggggaattatttttccaccgcgtcgtgggcgtgttcgtcctcgcggcaatccccttccgcacagtgaccgtacagatacagactgtggttggtcaggcggatgccgtggcgggaggcaatttcacgctggcgtaattcgatcgagtcgtcgctgaattcgatcacttttccgcagtcgaggcagatcaggtgatcgtggtgatgctgctgggtcagttcgaaaacggattttccgccttcgaaattatgacgagtcacgatgccggcgtcatcaaactggttgaggacgcggtaaacggtcgccagaccgatctcttcgcccatgtcgatcaggcgtttatataagtcttccgcactgacatgatggttatccggttcctgcagcacttcaaggatttttagtcgaggaagtgtgactttcaggccagccttctttaatgcggtattgttgtcagtcatgcggaatctgtcctgttgctaaacgatctacttccttcaacggaagtcatacagaaattaacccgacgtaatgcgtctcattatagaactgccactggtaaatgaaaactgcaagcatcaggcctggtttgctgtcaaaaacgaggcaccagctacaaactgcgtcacgtgcctcgtagaatcagaggacattgtacagatatgtgattaaaagttaaaaacttgtagctattagtttgattgcttttgtctattaatgcgacgcaactcaatgattgcgccgcttaatcatcaggcgtttttgatttcttcgaggtgcagctcttcggcaacctgcttcacccatttctcaacgcgctcgttggtcagctccggctggcggtcttcatcaatggcgaggccgacgaagtggtcgtcatccgccaggcctttggaagcctcaaaatgataccccgccgttggccagtgaccgacgatggtcgcgccgcgcggctcaatgatgtcgcggatggtgcccagcgcgtcgcagaagtattctgcgtaatcttcctggtcgccgcagccgaacagcgccaccagtttgccattgaagtcgatctcttccagcgtcgggaagaagtcatcccagtcacactgcgcttcaccgtagtaccaggtcgggataccgagcagcaggatgtcgtgggcttccaggtcttctttgctgcttttggcaatgtcgtgaacatcagcaacatctttaccaagctgcttttgaatcatttttgcaatattttcggtgttgccggtgtcgctgccaaaaaagatgccgatgattgccatgagtaaaataacctcttgaaacttaaatgatgtggtagggacgcaatgcccatagataacggcaatcatagcagaacaggcaagggcgcggaaacagcaatcacgcccgactgcacactctgctacatgaatgcgggtttttcgcggaaagttagacttttccctggctgcgcagggcggttaactgggtcatcagcatctcttcaatgagatcgctgcggctcatattacgcgcttccgccagctcgttgagcgcatcgaccgcatcggcgttgagttttaactccacgcgcttcagcccgcgaaccttatcgcgtttcagctggttacgtttgttgatgcgcagttgttcatcgcgcgacagcggattggttttcggtcttcccgggcgacgctcgtttgcgaacaaatctaatgtcgtacggtccgtttgttcttttgccatgattctgagtgacttcggggaaacaagctgccgggctctagccggcgcagatagcgcgccatcatacatcaggcgaacggctgcgccaacgaccgcgggcattctgcggcgcggtcgggcatattttagccaatcaggcggcgatgctcgtcagatagcggcggatggcgcgtaacaccgcctcgggtttctcggcatggacccagtgtccggcgccggcgatgacgtgggcccgggcctgcgggaactgggccagcagcgcgtcgcggtaggcgtcggtcacatagggcgagttgccgccgggaataaactgcgtcgggtgcggccaggccgggatggtttcccagccgacgatatgcggatactggtcccacagcaccggcacgttgaagcgccagtcgccgtcgacgaatgatttcagcaggaactgaatcacgccttcttcctgcaggtgctcgcgcatcacctgcgccgcctgctggcgggtgctggcggcggattcgctgacggcgcggatagcggcgaaaatctcatcatggcggcgaacgtgataatccaccggcgcgatatcgatcgccaccagaccgctgatgcgttcaggcgccagggcggtaagcgccattaccgctttcccgcccatcgaatggccgataaaggtggcgcgctcgatctggtgcgcgtcgagcgtatcaagcagatcctgcgccatggcggggtaggtcatctctggcgaccgcggcgacaaaccgtggttgcgcatatcgacctgcacaatatcgtggtcggcgatcaggtcgcgggcgaggatgcccaggttgtccaggctgccaaacagaccgtggaccagcacgatcggggagtggttgtgcggattctgtgcagattgcgctcggctatttaatttcatggcaaagttctttttttcgctccgtcgggttagggtattatgttggacattctgccatccggctgcaagacccagaagttttctgagttttaccgccatcctggtttgacgctatccgcggttgggatttgtacttataatcccaacgatttgtattcagaaaagatatcgcactggattaagatgaaaacaattgaagttgatgatgaactctatcgctatattgccagccacactctgcatatcggcgagagcgcatccgacattttacggcgtatgctaaaattttccgccgtttcccaaccggctacaccggtcagcaaagccgcgccgacgctggcgccagcgcctgtcgctgaggtgaaacccgctaacccggtgaaagataaagtccgcgccatgcgcgagatgctgttatctgatgaatacgccgagcagaagcgcgcggtgaaccgttttatgctggtgttgacgaccctctactccctggacagtaaagcatttgccgaggccaccgagtctctgcacggccgcacgcgcgtttacttcgcggaagatgcgcgtacgctgctgaaaagcggtaatcagaccaaaccgaaacaggttcctggtacaccgtggtgggtgatcaccaataccaataccggccgtaaatgcagcatgattgagcacatcatgcagtcgatgcagttccctgcggagctgattgaaaaggtttgcggcacgatctagctttttaacatttgcaccagaaggatcaggcaatggcaatcgataaacgtgcggggcagcctgcgcaacagagtgatttgattaacgtcgcccaactgactgctcagtactacgtgctgaagcctgaagtcggtaatgcggagcatgcggtaaaattcggcacctctggccatcgcggtagcgcggcgcgccacaacttcaacgaaccgcatatcctggccatcgcccaggccattgcggaagatcgtgcgaaaaacgggatcaccggtccgtgctatgtcggcaaagatacccacgccctctccgagccggcgtttatttcggtgctggaagtgttaaccgccaacggcgtcgacgtgatcgtgcaggaaaacaacggcttcaccccgacgccggcggtctccaacgcgattctggtgcataacaaaaaaggcggtccgctggcggacggcattgtgatcaccccgtcacacaacccgccggaagatggtggtatcaagtacaatccgccaaacggcggcccggctgataccaacgtcaccaaagtggtggaaaaccgcgccaacgaactgctggccgcgggcctgcagggcgtgaaacgcatttctctggacgcggcgctggcttctggccacgttaaagaacaggatctggtgcagccgttcatcgaagggctggcggatatcgtcgatatggccgcaatccagaaagccggcctgacgctgggcgtcgatccgctgggcgggtccggtatcgaatactggaaacgcattggcgagcactacaagctcaatctgaccattgttaacgatcaggtggatcagaccttccgctttatgcacctcgataaagacggcgccatccgcatggattgctcctcagagtgtgcgatggccggcctgctggcgctgcgcgataagttcgatctggcgtttgctaacgacccggattacgaccgccacgggattgtgaccccggcggggttgatgaacccgaaccactacctggcggtagcgatcaactacctgttccagcatcgtccgcagtggggcaaagaggtggcggtgggtaaaacgctggtctcctccgcgatgattgaccgcgtggtgaacgatctgggccgcaagctggtggaagtgccggtgggctttaagtggtttgtcgacggcctgttcgacggcagcttcggcttcggcggcgaagagagcgccggggcctccttcctgcgcttcgacggcacgccgtggtccaccgataaagacggcatcatcatgtgcctgctggcggcggaaatcaccgcggtgaccgggaaaaacccgcaggagcattacaacgaactggcggaacgcttcggcgcgccgagctacaaccgtctgcaggcttccgcgacctccgcgcagaaagcggcgctgtccaagctctctccggaaatggtcagcgctgacaccctggcgggggatccgatcactgcccgtctgaccgcggcgccgggcaacggggcggcgattggcggcctcaaggtgatgaccgacaacggctggttcgcggcgcgtccgtcaggcaccgaagacgcctacaagatctactgcgaaagtttcctcggcgaagagcatcgcaagctgattgaaaaagaagcggtagagattgtcagcgaagtgctgaagaacgcttaacgacgcactaccatcaggccccttgcgggcctgattttttttgcaaggatagcgatgaaaatacaacggaagtccctgtttttgttctgggcgtggatggatctctttttcgtcctgcaattcttatggtggaatattgcccaccgccgcctccctttttacgacgatctactcgcttatctccagctattgcacacctggggctccgcggcgatctggctgtacccgctgaatgttctgctgattatcagcatcccgctatcgatgatcttttttttccgccagagccgctatgcgctgtggctggcctgggggcaggcgccgctcaggctgctgtttatgcagccttcgctatcgctgggcctgtggctgattcaggctgccggggtccggcatgtagcgatcctggcaggctttctgctgctctctgaagggctgaaaatcgccagcctctggtactgcagaggcgggattcagggcataaagcgatagccaatcccggtttcggtcagcaaatgctgcggccgtgccggatcggcctccagcttttgtcgcagatgacccatatagatccgcagatagtggctgtgctccacggcgttaggcccccacacctgattcagcagctgacgctgggtaagcactttgccgggattattcaacagcgccgccagcaggcgaaactcgataggcgtcaggtggatctcttcgctgccgcgcaggatgcggcgggcggggatattgacctccaggtcagcgaagcgcaccaccggctcatcggcctgcgccgcgccgtggcgacgcagcgcgacgcgcaggcgggcctgcagctcgccgatgccaaagggtttacttaagtagtcatcggcgccggcatccagggcggcaattttgtcatgctcttcgctacgcgctgacaggacgataatcggcatctggctccactgacgcaggtcgcgaataaaatcaatgccgtcaccatccggcaggccgagatcgaggatcgcgaggtcgggcttacgggtggcggcttcaatcagcccacgctgcagggtttccgcttcaaatacgcgcatgccgtcggcttccagcgcggtgcgcagaaagcgtcggatagcgtgttcgtcttcgataatcagaacgttaatcacaattcctcaggtagctcttccagttcagggggcgtttctccaggcagtgtaacacggaatgaggcgccgccctcgggccggttgctggcggagatggtcccgccgtggacgtcgacgatggcctgacagatggcaaggcccagcccgacgccagggatcgccgactctttgttgccgcgggcgaatttatcaaagatagtctgttcctggcctgccgggatccctggaccgttatcccatacctccagcgacagctgccgggcgtccgcctcggcgcggatgccgatgctcgcccgggcgccggcatacttatgggcattttccagcaggttgatcagcacccgctcgaacagcggcccgtcgacatgcaccagctggaggggatcgggtaaatccagctgaatatgctggccgccgaggcttggctcgagcatgcgcagcgcgctgccgaccacttcctccagcgtcagccactccttatgcagattaaagccgccggactggatccgcgccatatccaacagattgttcaccagccgggtggtgttgagcacatgctggcggatttcgttggcctgcggggcatgttttgaaccttcgctggccagatcgagggtcagaatttccgcctggccaaacagcacggttagcggagtacgcagatcgtgcgacagggcggcgagcagcgagttacgcaggctttcccgctcgctggtcagccgggcctgctcttcgctggcggtcagggtgaggcgctccagggcgctggccaccagcagggtaaaggtctccagcagccgctgctgctccgggatcatcaattggcgcagattctccggttccaccaccagtagtccccaggtgcgggcggcgctcttcaggggcaagatctgatacggcacgccgggcagggtatcggtgccggcgccggcaggctgccccttatcaaagctccagcgggcgatggcatcatcccacggggtcagccctggctggtgggttaagggcagcagttttccctgggcgtccgggagcagcagctggctgcgggcctgaaaggtggaggcgataaaccgctcgctggtggtggcgatatcctgctggctgcgacccaccgccagcgctttagacatctcatacagatggcgggtacggcgttcacggtagcgcgccacccgcgcctggtagcgcacgccggcggtgaggttgccgataagcaggcccacggtgagcatcacgccgaaggtgagcagatactggacatccgacaccgccagcgttccgcgcggggcgacaaaaaagagatcgaagctgatgacgttgatcaccgtcgccagcaccgatggccagcggccatagaccagggcgatgagcaccacccccagcagatagagcatcaccagattggcggcttcgaaggccatcaaccactgcatggccaccagggtaatgatggcgcatagcgccaccgccaccgcgcagccctgcagctgcaggcgccatttctccagcgccggacggctgtcgctggcgcgtgcggcaagggggaagggtttctcatcgagggcgatcaccaccagatcgaggtccggcgcatggcgagccagacgatcggcgaagccgctgcgatcccaccagcggcgcttgctttggcggccaatgacgattttgccgaggttatgttcgcgggcgtaatggaggaccgctttctcttccgacgggtcggagagggtagcggtttcggcccccagctcctgggccagacgcagcgcggcgagaatagcccgccgccggccttccggcagccggtgcagggaaggggtctcgacatacaccgcatgccagacgctgcccaggcgggcggcgagccgggcggcggcgcgcaccagcttttcgctgccggtgttgtgcccgatacagagcaggatcgcatcgcgggtgtgccagactttctcctggccctggcggtcgcgccaggcgcgcatctgctcatcgacgcggtcggcggtgcggcgcagggccagctcgcgcagcgcaatcagattgcccttgcggaaaaagttttcgatagcgcgctcggcctggccgccgatgtagactttgccctcattgagccgctggcgcagatcgtcaggggggaggtccaccagcaccacgtcgtccgcggcgtcaaagaagggatcgggaaccgtctcccgcacctgcacgccggtgatcccgctgacgacgtcattcaggctttccagatgctggacgttaacggtagtgaaaacatctatcccggcctccagcagttcatccacatcctgccagcgctttggatggcgggagcctggcgcattgctgtgcgccagctcatccaccagaatcagcgccggacggcgggcgagggcggcgtcgagatcgaactcatagacgtaccgcccgcgatgggcaagccgccgcggcggcagagtgctcaggccctgcagcatcgcggcggtctctttacggccgtgggtctccgccacgccaatcagaatatccagcccctgggcgcgcagccgctgcgcttccgccagcatcgcccaggttttccccaccccggcgcaggcgccaaagaacactttaagtttgccgcgatgcggggcggcggtgtgctgcagcaggcggtcagggtccgggcgcagcggctcgtcactcatttacttatccttcagggcatccagcgccatattgagttgcagtatattgaccaccggctggccaaggaagctcagcagcggggtttgtgtggcctgattcaccaactgggttacctgctcaacgctcagctggcgcgcttgagccacccggggcacctgccacagcgcggcggccggagtcaggttgttatcgagaccgctcgccgaggtggtgaccagttcgaccggcacccgcgggtcggcgtccgggttggcggcgcgcagagcctgcacgcgctcgctcaccgctttatccagcgccgggttgctggcggcgaggttgctgccgccagaggccatgggattatccgccgtctccgcggtggccgacgggcggccctggaaatagcctgcggcggtgaagttctggccaatcagcgccgagccgcgcacttcaccgttcaggcggatcagcgagccgttggcctgtgagttaaaccaccattgtcccaggctggtggttagcagaggatagacgccgccggtgagcagcgttaacagaataaatagcacaagtgccggacgaatcaatgacatagtttgttcctcacaccagaccgctcagggtcagcagcaggtcgatggctttaataccgataaagggcaccagcagaccgccgaggccgtagatccacaggttgcggcgcagcatcgccgaggcggagagcgggcgatagctgacgcctttcagggccagcgggatcaggaagacgatgatcagcgcgttgaagataacggcgctgaggatcgccgatgagggcgaatgcaggcccatcacgttcagcatggccagctgaggatagaccgcggcaaacgccgccggaataatggcgaaatatttcgccacgtcgttggcaatactgaaggtggtcagcgagccgcgcgtcattaacatctgtttgccgatatggaccacctcaatcagcttggtggggttggaatccaggtcgaccatgttgcccgcttccttcgccgcctgggtgccggagttcatagctaccgccacgtcggcctgagccagcgcgggcgcatcgttggtgccgtcgccggtcatcgccaccagccgaccttccgactggtactgacggatcagcgccagcttggcttccggcgtcgcttcggcgaggaaatcatcgacgccggcctcggcggcgatcgccgcggcggtcaggcggttatcgccggtgatcatcaccgttttaatgcccattttgcgcagctgggcgaaacgttctttgatgccgcctttgacgatatctttgagcgcaataatccccagcaccttttccccttcggcgaccaccagcggcgtggccccctggcgggcgacctcttccacctgcttatcgacatcggcagggaagtggccgccgttggcctccacgtggcggcgaatggcgtccaccgaccctttgcggatcatgcgctgatcgatattgatgccgctcatccgcgtttgcgcggtaaaggggacaaaggtggcgtgcagcgactgcagatcgcgttcgcgcagattaaagcgctgtttcgccagcaccacgatgctgcgcccctcaggggtttcatccgccagcgaggagagctgggcggcgtcggcgagggttcgctcttccacgccgcgagccggcaggaaggcggaagcctggcggttgccgagggtaatggtcccggttttatccagcagcaggacatcgacgtcgccagcggcttccaccgcgcggccgctggtggcgatcacgttggcgccgagcatacggctcatcccggcgacgccgatggccgacagcagcccgccgatggtggtcgggatcaggcacaccagcagggcgaccagtacggtaacgctgaccgcattgccgctccacgccgagaagggccagatggtggcggtggccagcaggaacaccagcgtcagggcgatcagcaggatcgtcagggcgatctcgttcggcgttttacggcgctgggcgccttccaccatggcgatcatccggtcgaggaaggtttctcccgggttcacgctgcagcggatcaccagccagtcggagagaatgcgtgtcccgccggtcaccgaggcaaaatcgccaccggattcacggatcaccggggcagactcgccggtaatggcgctttcgtccaccgaggcgccgccttcgatgacttcgccatcgcaggggataatatccccggcttccaccagcaccacgtcgcctttgcgcaggtcttccgccggcacgtggtcgaccggcgcgttatgctgcggggcgcgcagtttgcgggcgaaggccgtttttttcacccctttcaggctgttggcctgggctttgctgcggccttccgccatcgcttcggcaaagttggcgaacagcacggtaaaccacagccagatactgacggcggcggtaaaggtggcgctaccggtcagggcgccgccagccatggcgatcgccagcagggtggttaacagactgcccacccagacgataaacatcaccggattgcgccattgcaccatcgggctgagttttttcacggcatccagcagcgcctggcgcaccagcgtcggctccagcagggctaattgtttgcgactcataacagggtgctccgcatcgctcaaagtaaggaaaagtgttcagccagcgggccaagcgccagcgcaggaataaaggtcagggcgcccaccagcagcacggtgccgatcagtaaaccgataaacagggcgtcgtgggtggccagggtgccggggctggccggttgaattttcttcgccaccagcgagccggcgatggccatcaccggaacgatgacggcgaagcggccgaccagcatgcagaacgccagcagcaggttccagaacggcgtcgccgcgcccaggccagcgaaggcgcttccgttgttattggccgccgaggtgacggcatacagcacttcgctaaagccgtgcggtccagggttgaacatcccggcgcggccggcgtcggtcatcatcgccagcgccgtgccaagcagcaccagcgtcggggtgaccagaatggcgagggcgatcattttcatttcccggacatcgattttcttcccgaggtactccggggtgcggccgaccatcagcccggcgataaataccgccagcataacgaacagcagcatgccgtacaggcccgagccgacgccgccgaataccacttcgccaatctgcatcagccacatcggcaccatgccgcccagcgcggtgaaggagtcatgcatggcattgaccgcaccgcaggaggcggcggtggtgatcaccgcgaacagactgctggcgagaataccgaagcgactctctttaccttccatattcaggctactgtcggcgcccagcgtcagcaggtgggggttgccgcgagtttccgcccacatcaccacggcgacgcagaggataaagatcagcgtcattgcccacaggatggcgcgtccctgacgccgatcgcttaccacctcgccgaaggcgaagcacagcgccgccgggatcaggaagatcgccaacatctgcacgagattggtcagcgcggtcgggttttcaaacggatgggcggagttggcattgaagaaaccgccgccgttagtgcccagcagcttaatcgcttcctgtgaggcgacaggccccatcggcagcagctggtgcaccccttcgagggtggtaaagggctggtaggcctgcagattctgcggcacgccctgctgaataaagagcagggccaccagcagagagagcggcagcagcagccacagggtaatgcgcgtcaggtcgacccaggcattgccgagggtcgacattttctgccgggcgaaggcgcgggtcaggacgaagaccacggcgatgccggtggcggcggagaggaaattctgcaccgtcagaccgaccatctggctgagataactcatggtgctttcgccggcgtaagcctgccagttggtattgctgacaaagctgatcgcggtattgagcgccagatcccatgacagccccggcaggtgctgcgggttaaacggcagcacgccctggagcatcagcagggcaaacagcgccaggccgccgagggcgttaaacagcaggagcgccagcaaatactgcagccagcccatctcttcggcgcggatcccggccacgcgccacaggacgcgctcgacgccggccaggccgggaagcgggatatcgttcaccattcttgccagacacatccccagcgggcgcgccagcaccagcaataccagcagatagctggctaataataaaaatccctgggcagccatcagaatgcctccgcatgtatcaaggcataaaccagataagccagtaacaggaacaccagcccaacgccagtgagtacgcctgcagtcacaatccacctccgggtgtgttttcgatttacctggaggatagaaattacggcgcaaagatttcgcaaaaatccgcgggtgcggtgtaaaaaaagtataaaaatgacaaaggcacaaattaactgatggttagtattaatttaactttttcgtaactaatttacgtggcgaatgtaaattaagtataaatacgtgctttttagtggtcggatgagtagtaaaattacaagcagagcggtattattttgctcacacaaacatgattaattttaccggcgctgcttgccggcctgacaaaggggagagaaatgatggcgttgtacaaagcttatcctgctcatattattttgctgcgtcgtgctttcgccgtcgtggctggcgtcgcagcgctgccggtgatgctgttctggaaagatcgcgcccgctactacagctggctgcaccgggtgtggtcgaaaaccagcgagcagccggtgtggatggcgcaggcggagaaagccgctcacgatttctattaatcctcctgctgcgaagaaaataacaagaccgccgggttgccccggcggttttttttcgccgcttgtctacactcgtttttatgcgccgccttggaattggcaggtgcgtattttgccggagcgcgctatttttgccggcttagatcataagatgagtattgctgacggataataaggagtgatatggccacccatctggtctggttacgcacggatttacgcattcacgataacctggcgctggctgccgcctgccgcgatccgcaggcgcaggtgctggcgctgtatatcgccaccccggggcagtggcgtgaacatcacctggcgccacggcaggccgcttttatcgccagccatttacagagtctgcatgccgcgctggcggaacggggcataccgctgtgggtagaagaggcggacgattttaccgccagcgtcgaacggctggccgatttttgccagcagcatcaggtcagtcacctgttctacaactatcagtacgaattcaatgaacgccagcgcgatgccgccgttgagaacaccttgcgcgacgtgatttgccagggctttgacgacagcgtcctgttgccgcccggcagcgtactgaccggtggcggcgaaatgtataaagtcttcaccccgtttaaaaatgcgtttattcgccgtctgcgggacgggctgccggcgtgcgtggcggccccgaagccgcgccaggcgcctgcccgccaggcgccgccgctgcctgagcttaactacccgcaaacgccgtttgacgggctgctgtttgccgcggatgaaaaaacggcgctggcgcgtctgcgcgcgttttgtcagcaagcggcggcggattacgaggggcagcgcgacttcccggccgtggaagggaccagtcgcctgtcgccctgcctggccatcggcgtgctgtccccccgccagtgcctgcatcgtctgctgacggaacatcccgccgcgctggacggcggagccggcgccacctggcttaacgagctgatctggcgcgagttttaccgccatctgatggtctactatccgaagctctgtaaagggcggccatttactgcctggacagataaggtcgcctggcgcgcagaggaggcctccctacaggcctggcagcgcggggagaccggttttccaattgttgatgccgccatgcgccagcttaacgccaccggctggatgcataaccggttgcgcatgattgtcgccagcttcctgaccaaagatttgcgcctcgactggcgggcgggcgagcgctatttcatgagccagctgattgatggcgacctggcggcgaataacggcggctggcagtgggcggcttcaacgggcaccgacgccgcgccctatttccgcatatttaatcccaccacccagggcgaaaagtttgataaacagggggtgtttatacgtcgctggctgccggagctggcaaaggtgccggagaaggccctgcatcagccgtgggcgtgggcggataaacaagggatcacgctggattattcgcgcccgatagttgatcacaagcaggcgcggcaggagacgctggcggcctgggaggccgccagaaaaggaattactccaccgccagacggcgggtcctgactttcagcgaatgatacagccagatgaccagcaccacgccgacgcaggccagcgcgccccaggtgatctggctgaagacggtaatgtaggcgtcaatggagtagttcaccgctccggcggcgtcgaatgacgcctgcgaggtctggtcggcgataacgccggccagatagttggcgatggcccctgagagcagcatataaataccggtcagcaccccagtgacacccgggatctcaatgcgggtgatctgcgacatcgcgaccgggtcgataaacagttcggcaaagcccatcaccgccagacccagcaccatcagcggcatggacgactgaccataggccgccgaccagcgggcgctgagggtcaaaatgcagaacccggcgctcatcaggcccagaccgagggcaaatttcccccagatgcgcacggtgcgattgccgttcacgctctctttcaccagccacgccagcaccatcccgcagagcatcaccgcgaaggcgttgattgactggaacatagcggtagggacttcgtagctcatgatatggcggttaacgaagcggtcaatatacaggctgatggagctcccgccctgctgggcgaaggcccagaacagcaggctgaaggcggtcaggacgacgattaggcgcagatccttgcgctgtttatcggtttcggcgcgcaggtagatccgcgccagtaccgcgaggccaatggccgtggccaccatcagggcatacaccgaccactcctgccagaacagtaccgcaatcagcagcggggcggtaaccagcaataccagcagccagccccagttcggcaacaggaagcggcgcgcgcacagcgcctggcggttgacgccggcggtatgctggaaatgacggttgccgcagaggaaaatcaccagccccgcgaccatgccgatggccgccagggcaaagcccatcgcccagctatactcctcctgtacgtagccgcaggcgatcggcgcgataatcgagccgatattgccggcggcatacatcagcgaaaagccgccatcgcgacgcggatcggcgggttcgtacagctcgcccagcagacagctgacgttggatttaaacaacccgtagccgcagacgatgatcgccagcgacaggtacaggaaaagcggagcggtttcgctggccccgagcaccagatggccaatggccatcagcagcgcgccgagcatgaccgccatccggttgcctaacagcttatcggccagatagccgccgaggatcggcgtcacatagaccagcgaacagtaggcgctgaacagggcgtaggcatggttatcgtcatatttgagctgattggtgagatagaggatcagcagggcgcgcatgccgtaaaagctaaaatactcccagatttgcagcgccacgacgtagtagatcgcccgcggttgcgatgatgttgtctgcatatgaagtgtgtttcctggcgtaaagcgaaagtcgatcgttctgcatgaatagcgatttatcagtcatattcatggcttgaggggctttctgattatttaatatgctttattagtgcataaatatacactaatgcgcggcgggatgaatagacaaattgcgggattcgttaaaaagtcatggtcagtgacggtagcggactatcgacgacccgaatggatatggttatgttatgcctttgtataacctgattatctgctggagtggcgatgaaaaatagcgaactggaacaactgattaacgacaagctcaatagtgcggccatcagtgacttcgcccctaacggtctgcaggtggaaggacgcgaaacggtgcacaagatcgtcaccggagtgacggcctgccaggcgctgctggatgaggccgtccgtctgcaggcagatgcggtgattgttcatcacggctatttctggaaaaacgaatcgccagtgatccgcggcatgaagcgccgtcgcctgaaaaccctgctggccaacgatatcaatctctacggttggcacctgccgctggatgcccatccggagctgggcaataacgcgcagctggcgcatctgctggggattaacgtgctcggcgaaatcgaaccgctggtgccttggggcgagctgtcgatgccggtttccggcctcgaactggcctcgtggatcgaagcgcgactggggcgcaagccgctgtggtgcggcgataccgggccggacaccgtcagccgcgtcgcctggtgtaccggcggcggccagagctttatcgacgccgcggcgcgctttggcgtggacgcctttatcaccggcgaggtgtcggaacaaactattcactctgcccgcgagcagggcctgcatttttatgccgccggccaccacgccaccgagcggggcggcattcgcgccctcagcgaatggctgacggaaacgaccgatctggacgttacctttattgatattcctaaccctgcctgacgggagagaagaaagtgcagcgagcgcgttgttatctgttaggtgaaacggcggtggtcctggagcttgagcctccggtgaccctggagagccaaaaacgtatctggggcctgacgcagcggttgaccgatcgcgaagaggtggttgaagtgatcccggggatgaacaacatcaccgttgtgctgcgtcgtccgcaggagatggcgtgggaggcgattgacaagctgcagcgctggtgggaagagagcgatgcgctggagccggaatcccgtgagataagtatcccggttatctacggcggcgaggcgggaccagatcttggcgacgtcgcgcgccatagcgggttgagcgaaaagcaggtggtcgaactgcactcttcggtggagtatatggtgtggtttctgggtttccagccggggtttccgtattttggcggcctgccggagcagctggcgatgccgcgtcgcgccgagccgcgcgtactggtaccggcgggatccgtcggtatcggcggatcgcaaaccggtatttatccgctggcgacgccgggcggctggcagctgctggggcgcacgccgctggcattattcgatccaaaacgtgaagagccggtgctgctgcgttccggcgatcgcgtgcgctttgtgccgcagaaggagggggtatgttgaaatttatccgcgccggcatgtatacctcggtacaggatggcggccgggaaggccagcgccagtgggggattagccgctgcggcgcgctggataaaccggcgatgaccattgccaatctgctggtgggcaatgcgccggaggcggcggcgctggaaattacgctgggtcaggtcgatgtgcagtttacccgccactgctggttcgcgttgaccggcgccgcctgtgaagcgacgctcgacggcgcgccggtctggttgggctggcgaatggaggcgaaggccgggcagcggctggtgctgaaaaatcctcagcatgggatccgcagctatctggcggtcgcgggcggtattgatgtccctgaagttttaggttcccgctctaccgatctgaaagtcggtatcggcggaatcgaagggcgccggttgcaggatggcgatcaagtgaagattgggaaatcgtcccgccgctttagcgcctcgcgcggcgttaaacagctgccgataggcaatattattcgcgcgctgccggggccggagtatcacgaattcgacagcgtgtcgcaggagtctttctggcgctcgccgtggaagctgagtccgcaaagcaaccgtatgggctaccgcctgcaggggcagccgctcaggcgcacaaccgaccgggaaatgctctctcatggcctgctgcccggcgtggtacaggtaccgcataacggccagccgattgtgttgatgaacgatgcgcaaaccaccggcggctatccgcgtatagcctgcattattgaagccgatatgtaccaactggcgcaaattccgctaggtcagccgatccatttcgtcccctgttcgctggaggaagcgctaaaagcgcgcgccgaccagcagcgctaccttgaacaactggcctggagattaagcgatgaaaattgatttaaatgccgacctcggcgaaggctgcgccagcgatagcgcgctgctgcagctggtctcttccgccaatatcgcctgcggctttcacgccggcgatgcggttctcatgcagcaatgcgtgcgcgaggcgctgaaaaacggcgtcgctattggcgcacacccgagcttcccggaccgggaaaattttggtcgaaccgcgatgcagttaccgccagagacggtctacgcccaggtgctgtaccaaattggcgcgctggcggcaatcgtacacgcccagggggcgagctgcggcacgtcaaaccgcatggcatgttgtacaaccaggcggcgaaagagccgcctttggccgacgctatcgctcgtgcggtgcgcgatgccgacgccgacctggtgctggttgggctggcgggcagcgagcttatccgcgccggacagcattatcagttgacgacgcgccaggaagtcttcgccgatcgcggctatctggccgacggcagcctggtgccgcgcagccaaccgggcgcgctgattgagagcgaagagcaggcgctggcgcaaacgctggaaatggtgcagcacaatcgggtgcgcagcctgagcggcgaatgggcgcatgttaaggcggaaacggtctgcctgcatggcgatggcgctcacgcgctcgatttcgcccgacgcttgcgcgccgcgtttgccgggcggaatatcgacgtcagcgcggacctcgagtaatagtccgcctaagttattaatnntaattaaatcaaataattaacaacactcacaatactcacaactgaacaggacgttattatgcaagaggcgatatccctctggccgctaatcggcattgccgtgattgtggtcggttttgtattacgctttaacccggtgctggtggtgattatctccgggatcgtcaccggcgtggcggcgcatatgccaatagccactattctggagaaactgggcgagggcttcctgaatacccgtaatctgccgtttattctgctgctgccgctggcggtgatcgggctgctggagcgccatggtctgaaagagcgggcgcaggcgtggatcgcgaagatccatagcgcgaccgccggacgtctgctgatcgtctatctgtttgtgcgcgaagccaccgccgctctggggttgaccagcctcggcggacatccgcaaatggtgcgcccgctgctggcgccgatggcggagggggcggcggaaaagcgctttggcccgctgccgggcaatgtacgctaccgcctgcgcgcgatgtcggcggcgaccgataacgtcgggctgttcttcggcgaagatatttttgtcgccttcggcgcgatcatcttcatgcacaactttatgctggagtcgggtgggatccagacagaaccgttgcatattgccctgtgggggatcccgacggcgatctgcgcctttctgatccacgccgcgcgcctgtggcgactcgatcgccatctccagcgcgagctggaccggataaacgccggacaggcgaaaggcggtgcggcatgaatttccagcaaacctatttatactggctggccggcgcggtactgctggtcgtggctatcatgtcctggcgcgacaaaagcaatccgcgacgtctgacaaccggtctgttctggggcctgtacgggctggtgttcttgctcggcgactggacatatcaactggtgggcgataagcgtacggtgaatatcgctgtcggcggggtggtggtcgtcctggcgctgatcgccggttttggcggcgtgcgcctcggcagctaccatcagcgtacccaggaagagaaaaccgccagcgcgaaacgcctcggcaacaaacttttctttccggcgctggcgattccggtcgtcaccgtcattggcgtactgctgtttaacaatctgccctcatggcaggtggcgctcttcgggccgggcaaccacgcgacgctgattactctgttctcgatgactgtcggtacgctgattggcctggcgatggcgattcgtatgacgcatgaaacggtggcgcagccaatgcaggaagcgcgccgtttgcttgattccgtcggctgggcctttatcctgccgcaaatcctcgcggtgctggggctgctgtttaccgcagcgggcgtcggaaccagcatttcatggctgaccgagcactatctggcggtcgataaccgctttatcgccgtggctgtgtatgccatcggcatggcggtgctgacaatggtgatgggcaacgcctttgccgctttcccgattgtgaccgccggagttggcattccgattttagtcctgcagcacggcggcaatccggcggtaatggcggcgattggtatgttttccggctactgcggcacgctgatgacgccgatggcggcgaacttcaatattgtcccggcggcgctgctggaactgccggataaaaatgcggtgattaaagcccagataccgaccggtatcctgctgcttatcgtcaatgtattcttactctatttcctgatgttcctgtaaggagggatgatggctggcgtattgattaccggttttgagccgttcggcggcgaaacggttaacccttcatgggaagtggttaagcagctggatggcatgattattcgcggacagcaggtggtggctaaacagttaccctgcgtattcggcgaagcgctgacggtgctgaaggcggcgctggaaacctatcaaccgcggctgacgattgccgtcggacaggccggcggccgtgtcgatattaccgtcgaacgtgtagcgatcaatgtcgatgatgcgcggatccccgacaataaaggccagcaaccgatcgatgaaccgatcgttgctaatggccctgcggcctgcttcagtacgctaccgatcaaagcgatcgtcagcgcgctgcgccagcaggggatcccggcctcggtgtcgcaaaccgcgggcaccttcgtctgcaatcacgtgatgtatggtttgctgcatcagctgcagggaaaaagcgggcagaagggcggttttatccatattccttatctgcctgaacaggcggcggcccacccggggcaggcgagtatgtcggtcgcgacggtacgcgcggcgctggaaacggcgattgccgtcgcccttgaacaggatgacgatgtcaaaattggcggcggcgccacccattaacagaaggatgacagtatgccggaaggtccggagatccgccgtgcggcggataaactggaggcggcaatcaaaggcgaacccttaaccaacgtctggttcgcctttcctcagttgcaaccctatcaaactcagctaattggtcagcgggtgacccatatcgccacccgcggcaaggccctgttaacccacttctccggcggattgaccctgtatagccataaccagctgtacggcgtctggcgtgtggtggatgccggcgttgagccgcaatcgaaccgcgtactgcgcgtcaggctgcagaccgccagcaaggcgattttgctctacagcgcgtcggacattgatatcctcacggcggagcaggttgccaaccatccgttcttgctgcgcgtcggaccggacgtgctggacatgacgttaaccgcggagcaggtgaaagcgcggctgctgtcggccaaattccgcaatcgtcagttttccggcctgctgctggatcaggcttttcttgccgggctcggaaactatctgcgggtggaaattctctggcaggtgggattaagcggtaagcgtaaagccgctgaactgagcgacagtcagctggatgcactggcgcacgcgctgctcgatatcccgcggctgtcctatcgtactcgcggtctggtggatgacaacaagcatcatggcgcgctgtttcgctttaaggtcttccatcgcgatggggaaaggtgcgaacgctgtgggggaatcattgagaagacgacgctctcctcgcggccattttactggtgtccaggatgccagcattaagccggctggcgggcgatttcagcatgaagcgcgttatcaggcataaaaaaacgcgccagcaggcgcgtttttatgatccggacagtgagattaacgcttaatgtcggactggaaatcgcgtttggcgtagccggtatacagctgacgcggacgggcgatcttcatgccatcgctgtgcatttcgttccagtgcgcaatccagcccacggtacgcgccatggcgaagataacggtaaacatggaggacggaatacccatcgctttcaggatgataccggagtagaagtcgacgttcggatacagtttcttctcgatgaagtacgggtcgttcagcgcgatatgctccagctccatggccacctgcagcaggtcgtctttggtgcccagctctttcagcacttcatggcaggtttcacgcattacggtggcgcgcggatcgtagtttttgtaaacacgatggccgaagcccatcaggcggaaagagtcattcttgtctttcgcacgacgaacaaattccggaatgtgctcaacggagctgatctcttccagcattttcagcgccgcttcgttggcgccaccgtgtgccggtccccacagggaggcgatgcccgcagcgatacaggcgaacgggttagcgccggaggagcccgcggtacgtaccgtggaggtcgacgcgttctgctcgtgatcggcgtgcaggatcagaatacgatccatcgcgcgctccagcaccggattgacttcatactcttcgcacggtgtcgcaaacatcatgcgcaggaagttgccggcataggagaggtcgttgcgcggataaacaaacggctggccgatagaatatttgtaacacatggctgccatggttggcattttggacagcagacggtaggcggcaatctcgcggtgacgcgggttattcacgtcgagggaatcatgatagaacgccgccagcgcgccggtgatcccgcacatcaccgccatcgggtgggaatcgcgacggaacgcgtggaacagacgggtgatctgctcatgaatcatggtgtggcgggtgacggtagttttgaattcgtcatattcggcctgagtcggcttttcgccgtacagcaggatataacagacttcaagataattagattcggtcgctaactggtcgatcgggaagccgcggtgcagcaggatcccctcgtcaccatcgataaacgtaattttagattcacaagaagccgttgatgtgaaacctgggtcaaaggtaaatacgccttttgaaccaagactacgaatatcaataacatcctgaccgagcgtgccttttagcacatccagttcaatagcagtgtcaccacccagggtgatttttgctttagcatcagacatttatggtctccttagcgcctttattgcttaagactgccgggtggtggatttgctttcggcccgcgcctgcatacgttaccagtttgttatgttgcacacagctctgcgtcagcgaaaagggcagggtacagagcaacggcgcttgatggcacgtccttcagggctgcggtgaaacaacagcaaatcagcgttttagcagtccgaatattaaaacctatataccactaataactgtcctgattacatcggtcaatactgacacactgttacataacttattctcaggtgaaagagtgaccccataacttttgagcattattgcatttaactggtaatggttgtaacaagaatgtttaatatttgtcaaatcaggtgattaaaaattaaaaaaatgttggtatcgtgaccttgatcactgttccggagaaaacccaacaaactatatgtaggttaattgtaatgattttgtgaacggcctatactgcggccaggtctccggaacaccctgcaatcccgagccacccagcgttgtttagtgatgttttaatgcctgaaaagacgttttaacatgacttctggttatagaaaggacgctgtctgacccgcaagcagaccggaggaaggaaacaataagaacagcatgtgggcgttattcatggtaagaaatgtgaaaaaacaaagacctgtcaatctggatctacaaacgatacggttcccaatcacggcgatagcgtccattctccatcgcgtttccggtgtcatcaccttcgtggcggtcggaattctgctttggctgctgggcaccagcctttcctccccagaaggttttctgacggcggcctccatcatggatagcttctttgtgaagttcatcatgtggggcattctcaccgcgctggcctatcacgtcgttgtcggtattcgccatctgatgatggactttggctaccttgacgaaaccctcgaagcagggaaacgttccgccaaaatttcttttgttattactgtcgtgctttcacttctcgcaggagtcctcgtatggtaagcaacgcctcagcactgggacgcaacggcgtacatgactttatcctggtccgtgctaccgccatcgttctgaccctctacatcatctacatggttggcttcttcgccaccaccggtgaaatctcatgggaagtgtggaccgggttctttgcctccggcttcactaaagtcttcactctgctggctctcgtttccattctcatccatgcctggatcgggatgtggcaggtgttaacagactacgttaaaccactggctctgcgcctggttctgcaactggctatcgttgtggcgctggtggcttacgttctttatggatttgttgtggtgtggggtgtgtaatgaaattgccagtcagagagtttgatgctgttgtcatcggtgccggcggcgcaggtatgcgcgcggcgctgcaaatttcccagagcggacagacctgtgcactgctctccaaagtgttccctacccgttcccataccgtatccgcgcagggtggcatcaccgtcgcgctcggtaactcccatgaagataactgggaatggcatatgtacgacactgtaaaagggtcggactatatcggcgaccaggacgccatcgaatacatgtgtaagaccggcccggaagcgattcttgagctggagcacatgggactgccgttctctcgtcttgacgatggccgtatttatcagcgcccgtttggcggccagtcgaagaacttcggcggcgaacaggcggcgcgtaccgcggcggcggctgaccgtaccggtcacgccctgctgcacactctgtatcagcagaacctgaaaaaccacaccactatcttctccgaatggtacgccctcgatctggtgaaaaaccaggacggcgcggtagtcggttgtaccgccctgtgcatcgagaccggcgaagtggtctactttaaagcccgcgccaccgtgctggcgaccggcggcgcaggccgtatctatcagtccaccaccaacgcccacatcaatacgggtgacggcgtcgggatggccatccgcgccggcgtgccggtgcaggatatggaaatgtggcagttccacccgaccggtatcgccggggctggggttctggttaccgaaggttgccgcggcgaaggcggttacctgctgaacaaacacggcgaacgctttatggagcgttatgccccgaacgctaaagaccttgcgggccgtgacgtggtggcgcgttccatcatgatcgaaatccgcgaaggccgcggctgcgacggtccgtggggcccgcacgcgaaactgaaactggatcacctcggtaaagaggttctggaatctcgtctgccgggtatccttgaactttcccgtacctttgcccacgtcgatccggtgaaagagccgatcccggttatcccaacctgtcactacatgatgggcggtatcccgaccaaagtcaccggccaggcgttgaccgtgaatgagaagggcgaagacgtggtgatcccgggcctgttcgcggtaggcgaaatcgcctgcgtatcggtccacggcgccaaccgtctgggcggcaactcgctgctcgacctggtggtcttcggccgcgcggcgggcctgcatctgcaggaatccattgccgagcagggcacgctgcgcgacgccagcgaatccgatatcgaaggctcgctggatcgcctcaaccgctggaacaacacccgctctggtgaagatccggtggcgattcgtaaagcgctgcaggaatgtatgcagcataacttctcggtgttccgcgaaggcgatgcgatgcacaaaggtctggagcaactgaaagtgatccgcgagcgcctgaaaaacgcccgtctcgacgatacctccagcgagttcaacacccagcgcgttgagtgcctggagctggataacctgatggaaaccgcctacgcgaccgccgtatccgctaacttccgtaccgagagccgtggtgcccacagccgcttcgacttcccggatcgtgatgatgaaaactggctgtgccattccctgtacctgccagagtcggaatccatgacgcgtcgtagcgtcaatatggaaccgaaactgcgtccggcattcccgccgaagattcgtacttactaatgcggagacaggaaaatgaaactcgagttttcaatttatcgctataacccggatgttgacgacgctccgcacatgcaggattacacccttgaagcggaagaaggtcgcgacatgatgctgctggatgcgctgatccagctgaaagaaaaagatccgtcgctgtcgttccgccgctcctgccgtgaaggggtctgcgggtccgatggtctgaacatgaacgggaaaaacggtttggcgtgcatcacgccaatctccgcgctgaatcagccgggcaagaagattgttatccgtccgctgccaggattaccggttatccgtgatttggtggtggacatggggcaattctatgcacaatatgagaagattaagccttacttgttgaataatgggcaaaatcctccggctcgcgagcatctgcagatgcctgagcagcgtgagaaactcgacgggctgtacgagtgtattctgtgcgcctgctgttcgacctcgtgcccgtcgttctggtggaacccggacaagttcatcggcccggctggcctgctggccgcgtatcgcttcctgatcgacagtcgcgataccgaaaccagcgagcgcctggacggcctgagcgatgctttcagcgtattccgctgtcacagcattatgaactgcgtcagtgtgtgtccgaaggggctgaacccgacgcgcgccatcggccatattaagtcgatgctgctgcagcgcagcgcgtaagcaacacggtctgtcccggatggcgctagcgcttatccgggctaccaaagcagtagccccggcaagcgttagcgccgccgggggatatagcaggaaatctttaaaaaccgccacaagatgtaccagtaatcgaggcgttcagtgcgaggtaaggcggcaactgagcgcatccccgggagcatagtgaactatgtgaccggggtaagcgaaggcagccaacgcaaccgcagcctgaacgctgaagattaatggcagtttttaaaggttccttagcggatagaaaccacaactcgtccgcaacaagtgaaccccggcacgtgcactcggtgtgcgtggtagtttctacggcgaaataagcatatgaatgcttaagggatcacgatgcagaacggcgcaatgaaagcctggctggactcttcttacctctctggttcgaaccagagctggatagaacagctctatgaagacttcttaaccgatcctgactctgttgacgccaactggcgttcaatgttccagcagttacctggcaccggagttaaaccggatcaatttcattccaaaacgcgtgattatttccgtcgactggcgaaggatgcctcacgttacacttcttcgatttccgacccagacaccaatgtgaagcaggttaaagtcctgcagctcatcaacgcataccgtttccgtggccaccagcatgcgaatctcgatccgctggggctgtggaagcaagagagagtggcggatctcgatccggcctaccacgatctgaccgaggccgatttccaggaaagctataacgtaggttcatttgccatcggtaaagacacgatgaagctgggcgagctgattgccgccctcaagcaaacctactgcggctccatcggcgcggaatacatgcatatcacctctaccgaagaaaaacgctggatccagcagcgcattgaatcggtagctggcaaagcgagctttaccgcggaagagaaaaaacgcttcctcagcgaactgaccgccgcggaaggtctggagcgctacctcggcgccaaattcccgggggcgaagcgcttctcgctggagggtggcgacgccctgatcccgatgctcaaagagatgatccgccatgcaggcaaaagcggcacccgcgaagtggtgctgggcatggcgcaccgcggccgtctgaacgtgctggtcaacgtgctgggtaaaaaaccgcaggacctgttcgacgagttcgcgggcaaacataaagaacacctcggcaccggcgacgtgaagtaccacatgggcttctcttccgatatggaaaccgaaggcggtctggtgcacctggcgctggcgtttaacccgtcgcacctcgagatcgtcagcccggtggttatcggttccgtacgcgcccgtctggatcgtctggacgagccaagcagcaacaaagttctgcctattaccatccacggcgacgccgccgtcaccggccagggcgtggttcaggaaactctgaacatgtccaaagcccgcggttacgaagtgggcggtaccgtgcgcatcgttatcaacaaccaggtgggcttcacgacctctaacccgctggatgcgcgctcaacgccgtactgcaccgacatcggtaaaatggtgcaggcgccgatcttccacgtgaacgcggacgatccggaagcggtcgccttcgtcacccgtctggcgcttgatttccgcaatacctttaaacgcgatgtcttcattgacctggtgtgctaccgccgtcacggccacaacgaagccgatgagccgagcgcaacccagccgctgatgtatcagaagatcaaaaagcatccgactccgcgcaaaatctatgctgacaagctggagcaggagaaggtggcgactctggaagatgcgaccgagcaggttaacctctaccgcgatgcgctggatgccggcgaatgcgtggtgcaggaatggcgtccgatgaatatgcattcctttacctggtcgccgtacctcaaccacgagtgggacgagagctatccggataaagttgagccgaaacgtctgcaggagttggccaaacgcatcagcacggtaccggaaggtatcgagatgcagtcccgcgtggcgaaaatttatgccgaccgccaggcgatggcggcaggcgagaagctgtttgactggggcggtgccgaaaacctggcctacgccacgctggttgacgaaggtattccggttcgtctgtccggcgaagactccggccgcggcaccttcttccaccgtcatgcggtgatccataaccagaccaatggttcaacctacacgccgctgcagcatgtccataacggccagggccagttccgcgtttgggactcggtgctgtccgaagaagcggtgctggcgttcgaatatggttacgccaccgccgagccgcgcactctgaccatctgggaagcgcagtttggcgacttcgccaacggcgcgcaggtggtgatcgaccagttcatctcctccggtgagcagaagtggggaaggatgtgcggcctggtgatgctcctgccgcacggttacgaaggccagggcccggagcactcctccgcgcgtctggagcgttatctgcagctgtgcgctgaacaaaacatgcaggtctgcgtgccgtccacgccggcacaggtttatcacatgctgcgtcgccaggcgctgcgcggtatgcgtcgtccgctggtggtgatgtcgccgaagtcgctgctgcgtcatccgctggcggtttccagcatggatgagctggcgaacggcactttcctgccggctattggtgaaatcgatcaacttgatccgcaggctgtgaagcgcgttgtgctgtgctctggtaaggtttactacgacctgctggaacagcgccgcaaaaacgagcaaaaagatgtcgctatcgttcgtatcgagcagctctatccgttcccgcatcaggcggtgcaggaagcgctgaaagcgtatgcgcacgtgcatgattttgtctggtgccaggaagagccgctcaaccagggcgcatggtactgcagccagcatcacttccgtgaagtgattccgtttggggcctctctgcgttatgcaggccgcccggcctccgcctctccggcggtagggtatatgtccgttcaccagaaacagcaacaagatctggtcaatgacgcgctgaacgtcgattaattaaaggatacacaatgagtagcgtagatattctggttcccgacctgcctgagtccgtagctgacgcaaccgtcgccacctggcacaaaaaaccgggcgacgcggtcgtccgtgacgaagttctggtcgaaatcgaaactgacaaagtggtactggaagtaccggcatcagcggacggcattctggatgcagtgctggaagacgagggcgccaccgtcctgtctcgccagatccttggccgcctgcgcgaaggcaacagcgcaggtaaagaaagcagcgagaaagccgatgcgaaagcgtccactccggcgcagcgtcagcaggcctctctggaagagcagaacaacgacgcgctgagcccggcgatccgtcgtctgctggctgaacacaaccttgacccagcggccatcaaaggcactggcgtcggcggccgtctgacccgcgaagacgttgagaaacatctggcgaaagccccggcgccggcagaagccaaagcgccagccgccgccccggcagccgcgccggcgccgcagctgggccaccgttcggaaaaacgcgtcccgatgacccgcctgcgtaaacgcgtagccgaacgtctgctggaagcgaaaaactctaccgccatgctgacgacctttaacgaagtcaacatgaagcccatcatggatctgcgtaagcagtacggtgaggcgttcgaaaaacgtcatggcatccgcctgggctttatgtccttctacgtgaaagcggtagtggaagcgctgaaacgctatccggaagtgaacgcttccatcgatggcgacgacgtggtgtaccacaactacttcgacgtcagcatggccgtttccactccgcgcggtctggtcaccccggttctgcgtgacgtcgacctgctgggcatggcggatatcgaaaagaatatcaaagagctggcagtgaaaggccgcgacggcaagctgaccgtagacgacctgaccggcggtaacttcactattaccaacggcggcgtcttcggctccctgatgtccacgccgatcatcaacccaccgcagagcgctattctgggtatgcatgccattaaagaccgtccgatggcggtcaatggcaaggtagagatcctgccgatgatgtacctggcgctctcctatgaccaccgtctgatcgacggacgtgaatcggtaggcttcctggtggcgattaaagagctgctggaagatccgacccgtctgctgctggacgtgtagtcagcaagcgtattacctaccgtaggccggataacacgcgttagcgccgttatcaggcctacaggtttaaagataattacaccctgaaggatggactgaacacatgaacttacatgaatatcaggcaaaacaactttttgcccgctatggcttaccggcgccggtgggttatgcctgtactactccgcgtgaagcagaagaagccgcttcaaaaatcggcgcgggtccgtgggtagtgaaatgtcaggttcacgctggtggccgcggcaaagcgggcggtgtgaaagtagttaagagcaaagaagagatccgcgcatttgccgagcactggctgggcaaacgtctggtgacctatcaaacagatgcgaacggccagccggttaaccagatcctggttgaagcggcgaccgatattgacaaagagctgtacctgggcgcggttgttgaccgcagctcccgtcgcgtggtgttcatggcgtctaccgaaggcggcgtggaaatcgagaaagtggcggaagagaccccgcacctgatccacaagatcgccatcgatccgctggcgggcccgatgccttaccagggtcgtgaactggcgttcaaactgggtctggaaggtaaacaggttcagcagttcaccaagattttcatgggtctggcgaccattttccttgagcgcgacctggcgctgatcgagatcaacccgctggtgatcaccaagcagggcgacctgatctgcctcgacggcaaactgggcgctgacggcaacgcgctgttccgccagccggatctgcgcgaaatgcgcgatcagtctcaggaagacccacgtgaagcgcaggcggcgcagtgggaactgaactacgtcgcgctggacggcaacatcggctgcatggttaacggcgcaggcctggcgatgggtaccatggacatcgttaagctgcacggcggcgaaccggctaacttcctcgacgtaggcggcggcgcgaccaaagagcgcgtgaccgaagcgttcaaaatcatcctctctgacgacaacgttaaagcggtgctggttaacatcttcggcggcatcgtgcgttgcgacctgatcgctgacggcatcatcggcgcggtagcggaagtaggggttaacgttccggttgtggttcgtctggaaggtaacaacgccgaactgggcgcgaaaaaactggctgacagcggcctgaatattattgcagcgaaaagtctgacggacgcagcacagcaggttgttgccgcagtggaggggaaataatgtcagttttaatcaataaagataccaaggttatctgccagggcttcaccggtagccaggggaccttccactctgaacaagcgatcgcttacggtacgcaaatggttggcggcgtgacgccaggcaaaggcggcaccactcacctgggcctgccggtgttcaacaccgtgcgcgaagccgttgaagcgaccggcgcgaccgcgaccgtgatctacgttccggcgccgttctgcaaagattccatcctggaagcgatcgacgcgggcattaagcttatcatcaccatcaccgaaggtatcccaacgctggatatgctgaccgtgaaggtgaagctggacgaagcgggcgtgcgtatgatcggcccgaactgcccgggcgttatcactccgggcgagtgcaaaatcggcatcatgccgggtcacattcacaagccgggtaaagtgggcatcgtttcccgttccggcaccctgacctatgaagcggttaagcagaccaccgactacggcttcggccagtctacctgcgtcggtatcggcggcgacccgatcccgggctccaacttcatcgatatcctgaagatgttcgaggaagatccgcagaccgaagcgatcgtcatgatcggtgagatcggcggcagcgcggaagaagaagcggctgcttatattaaagatcatgtcactaagccggttgtcggctacatcgcgggcgttaccgcgccgaaaggcaagcgtatgggccacgcgggcgctatcatcgccggcggtaaaggtacagcggatgagaaattcgcagcgctggaagcggcgggtgtgaaaactgttcgcagcctggccgacatcggcgaagcgctgaaagctattatcaagtaaaccctctctgcttgtccgcaagcagaaatctgtccgatttcgacatggttggccaccgtcaggtggccttttttgtgaccgttatcccgtctcgtcagaaccgcagcgccaacaacgaattgattttctgcgaaaagccctatctatcatattgatttaatttattatttaataagtattttcgatgcgctgtactggctaaaaaatatatcccggctgtaccgttgggaaacaaaagcggcagcgaaaaagcgtggggcaggggataaggaagaagataaaatactgtgagcggtctaacattattcggatcggttccttttttttgttttttttccacgacgttaaataatattacctatgattctcatatctctctttttagtaactggaaaagccatagtttaaacacttaattaacattaagttcaccaatattctttattgggctacataattaacacatagagtaaaaattgatttatatcaatacttaatccttggaaaaatccctcaaaaaacgttaaattgtctcaagtcaaattggctgaattcagccatcttcactatatattgatcaccgtcgaaaaatgtaaaactggaacaataaaaacatatttattgtaaggttattgcggcgtaatatattggggaatcaattgggtttttcgttaacgtatttgtaaccttaccctggcatggttttaccttcgattgaaacctgctgtggacgggcgacaaataaatttgtattggggcatgcgtatgagccagagcttctcggttcattttcggagtcttcatgcgatgagcaaggagtcatgatgttagatatagtcgaactgtcgcgcttacagtttgccttgaccgcgatgtaccacttcctgtttgtgccgctaacgctcggtatggcgttcctgctggccatcatggaaacggtctacgtcctttccggcaaacagatttataaagatatgaccaaattctggggcaagttgtttggtatcaacttcgcgctgggtgtggcgaccggtctgaccatggagttccagttcgggactaactggtcgtattactcacactacgtgggcgatatctttggtgcgccgctggccattgaaggtctgatggccttcttcctcgaatccacctttgtaggtctgttcttcttcggttgggatcgtctgggcaaagttcagcacatggccgtcacctggctggttgcgctgggttccaacctctccgcgctgtggatccttgtcgccaacggctggatgcagaaccctatcgcatcggacttcaacttcgaaaccatgcgtatggagatggtcagcttctctgaactggtgctcaacccggtcgcccaggtgaaattcgttcacactgtggcgtcgggctatgtcaccggcgcgatgttcatcctggcgattagctcctggtacatgctgaaaggtcgcgacttcgcctttgccaagcgctcctttgccatcgcagccagcttcggtatggcggcgatcctctccgttattgtgctgggtgacgaatccggttacgaaatgggtgacgtgcagaaaaccaaactggcggctatcgaagcagagtgggaaacccagcctgcgccggcggccttcaccctgtttggtattcccgatcagaatgcgcagaccaaccactttgcgatccagatcccctacgcgctgggcatcattgctacccgctcggtggacaagccggttatcggcctcaaggatctgatggttcagcacgaagagcgtatccgtaacggcatgaaagcctacgcgctgctggaacagctgcgcgccggttcaaccgatcaggccgtgcgtgaccagttcaataacgtgaagaaggacctcggttatggcctgctgttgaagcgctataccccgaacgtcgctgacgccacggaagagcagatcgccaaagcgaccaaagactccattccaagcgtcgcaccgctgtacttcgccttccgtatcatggtggcgtgcggcatcctgatgctgctgattataggcgcctccttctggagcgtgatccgtaaccgcatcggcgagaaaaaatggctgctgcgcgccgcattctacggcctgccgctgccgtggattgccgtggagtcgggctggtttgttgccgaatacggccgtcagccgtgggcgattggtgaggtcctgccgacggcggtggctaactcatcattgaccgcgggcgacctgatcttctcaatgttgctgatctgcggtctgtacacgctgttcctggtggctgaactgttcctgatgttcaagtttgcccgcaaaggacctagcagcctgaaaaccggccgctatcactttgaacagtcctctgcggctattcagtcgacacgctaagacaggagtcgtcaaatgatcgattatgaagtattgcgttttatctggtggctgctgattggcattctgctgattggttttgccgtcgccgacgggttcgacatgggggtgggcatgctcacccgcttcctcggccgcaacgacaccgagcgtcggattatgatcaacgccatcgccccgcactgggacggtaaccaggtgtggctgatcaccgccggtggcgcgctgttcgctgcctggccgatggtttacgccgcggcgttctctggcttctatgtggcgatgattctggtgctggcctcgctgttcttccgtccggtcggttttgactaccgttccaagatcgaggacacccgctggcgcaacatgtgggactggggcatcttcatcggtagcttcgtgccgccgctggtgattggcgtggcctttggcaacctgctgcagggcgtgccgttccacgtcgatgaatacctgcgtctgttctataccggtaacttcttccagttgctgaacccgtttggtctgctggccggtatcgtcagcgtggcgatgatcctgactcagggcgccacctacctgcagatgcgtaccgtaggcgaactgcacctgcgtactcgcaccgtttccatggtggcggcgctggtgacgctggtctgcttcgcgctggcgggcgtgtgggtctactacggcatcgacggctatgtggtgaaatcggtgattgaccataccggcccgtctaacccgctgaccaaggaagtggtgcgggaagctggcgcgtggatggtgaactttaacaatatgccagcgctgtgggcggtgcctgccctgggcgtggtgttgccgctgctgaccgtcgtttcgaccaaagcggataaaggtgcctgggcattcctgttctcctcgctgaccctggcctgcatcattctgactgccggtatcgcgatgttcccgttcatcatgccgtccagcaccatgctgaacgccagcctgacgatgtgggacgcgacctccagtcagcggacgctgaacctgatgacctacgtggcgattgttttcgtgccgatcattctggcctacaccagctggtgttactggaagatgtttggccgcatcacgcgcgaagacatcgaaaagaatacccactcgctgtactaaggtaaggagctatatatgtggtacttcgcatggattttgggaacgcttcttgcctgtgcttttggggtcattaccgcgctggcgcttgagcacgtggaagccaccaaagccgggaagaaagaagaaatctgatgaaatttatcgctactctgtacgcgataatggacaagcgcccgctccgggcgctttccttattgatggcgctgctgctggctggctgcattttctgggatccgtcgcgctttgcggcgaagaccagcgagctggaaatctggcatggtttcttgctgatgtgggcggtttgcagcggcgttattcacggcgtgggctttcgcccgcgtgccgttcactggcaggggattttttgtccgcttatcgctgatatcgtgctcgctttaggtctcttctttttcttcttttgaataagagatctctgttaatgctatgggcttgcataagcccataaaaatttacgccccgtttactttcccccattccaaaccacctttcccgcgcgtatagtagcgaagtttgaaagctctaacctttttttgcattaccgggatgtaaagtgaatacaacgctgtttcgatggccggttcgggtctactacgaagataccgatgccggtggtgtggtttaccacgccagttacgtcgctttttatgaaagagcacgcacagagatgctgcgccaccatcactttagtcaacaggtgctgttggctgaacgcgttgccttcgtggttcgcaaaatgacgctggagtattttgcccccgccagactcgacgacatgctcgaagtccagacggaaattacctcgatgcgcggcacctctttggttttcacgcagcgaatcgtcaacgccgagaatacagtgttaaacgaagctgaggttctcattgtgtgcgttgatccactcttaatgaagccacgtgcgcttcccaagtctattgtcgcggagtttaagcagtgactgacatgaatatccttgatttgttcctgaaggcgagccttctggtaaaacttatcatgttgattttgattggtttttctatcgcttcctgggctatcattattcagagaacgcgtatccttaactcggccgcgcgtgaagctgaagcgttcgaggacaaattctggtccgggatcgagctctctcgtctgtaccaggagagccaggggcgtcgcgataacctgaccggttcggaacaaatcttctacagcggtttcaaagagtttgcgcgcctgcatcgggccaacagccatgcgccggaagcgattgtcgaaggggcatcgcgcgcgatgcgtatttcgatgaaccgcgaactggaaacgctggagacccatattccgttcctcggcaccgtaggctcgatcagcccgtatatcggtctgttcggtaccgtctgggggattatgcacgcctttatcgcccttggcgcggtgaagcaggccaccctgcagatggtggcgccaggtatcgccgaagcgctgatcgccaccgcgattggtctgttcgccgcgatcccggcggtcatggcgtataaccgcctgaaccagcgcgtgaacaagcttgaactgaattacgacaactttatggaagagttcaccgctattctgcaccgtcaggcctttaccaccagcgaaagcaataaggggtaagccatggccagagcacgtggacgcggacgtcgcgaactgaagtccgagatcaacatcgttccgctgctggatgtcctgctggtgctgctgctgatctttatggcaacggcgccgatcattacgcagagcgtggaagtcgatctgccggacgccacggaatcgcaagcggtgaaaagcaatgacgatccgccggtgattgtggaagtctccggggtagggcagtacagcgtgaaggtggggcaggagacgctgtcccagctgccgccggagcaggtaattgccgaagcgaagcgtcgtcttgaagccaatgaaaaaacggtattcctgatcggcggtgcgaaagacgtcccttacgatgaaattattaaagcgctgaacctgttgcatagtgcaggggttaaatcggtcggcttgatgaccaaacctatttaatcgcttcaggtaggtgcgtccgtgcggcgtccggtggcgggtatcgctcgccgtcggtgcgcatcgcggatacaggcgaacagtttttgggaaccgatagtgtcaaaggcaaccgaacaaaacgacaagcttaaacgagcgatcatcatttcagtcgcgctgcacatcattctgatcgcgctgctgatctggagttcgtttgacgagcatctggatgcctctgccggcggcggcggcggatcgtcgattgatgccgtcatggtcgatccgggggcggtggtaaataactataaccgtcagcaacagcagcaggccagcgcacgtcgcgccgctgaacagcgtgaaaaacaggcgcagcagcaggcggaagagttacgtgagaaacaggcggcggaacaggaacggctgaaacagctcgaacaggagcggctgcaggcgcaggaagcggcgaaagaagcgaaggagcagcagaagcaggctgaagaagcggctgccaaggccgccgcggcggcaaaagccaaagcggacgcacaggcaaaagaagcgcaggaagccgctgccaaagcggccgccgaggcgaaagcgaaggcggatgcccaggcgaaagcggcagaacaggcggcggccaaggcggctgctgacgcgaagaagcaggccgaagccgctgcagcgaaagccgctgccgaggcgaagaaacaggcggaagctgaagcggcgaaagctgcggccgaggcgcagaagaaagcggaagcggcggctgcgaagaaagcgcaacaggaagcggagaaaaaagcccagcaggaagcggctaagcaggcggcagctgaaaaagcggctgctgagaaagccgccgcgcaaaaagcggccgctgagaaggccgccgccgagaaagccgcagccgctgaaaaagcggcggcagcgaaagcggctgcagcagagaaggctgcagctgataaagcggccaaggcggcagcagcaaaagccgcggcggcgaagaaagcggcggctgcgaaagaagcggacggcgttgacaacctgctcggcgatctgagttctggtaagaatgcgcctaaaacaggcggtggggccaaaggaaacaatgcctccgctgccgggagtggtaatactaaaaacagtgcctcaggggctgatatcaacaactatgccggacagataaaatcggcgattgaaagtaagttttatgacgcatcgtcctatgcgggcaaaacatgtaccttgcgtatcaaacttgctcctgacggtctgttgttaaatatacagtccgaaggtggtgatcctgctctgtgccaggccgctcttgccgcagcccgacaggctaagtttccgaaaccacctagccaggcagtatatgaagtcttcaaaaatgcgccactggacttcaaacctcagtgacatttttccccgtgcaaacggggaaaaacaatctatggtagtcacagggttttggtagttttgtatatttgagtttgttaacattctgctaaattatcgtgggctttctgcccggataagggagatatgatgaagcaggcattacgagtagcatttggttttttaatgctgtgggcggcggtgctgcacgcagaagtacgtatcgagatcacccagggggtggactcggcgcgccctatcggcgtggtaccgttccagtgggccggccagggcgctgcgccggaagatgtcggtggtatcgtggcagctgacctgcgcaacagcggtaaattcaatccgctggatcgctctcgtctgccgcagcagccgaccagtgcccaggaagtgcagcctgctgcctggtctgcgctgggtattgacgccgtagtcgtcggccaggtcacgcaaaatccggatggttcttatcaggttgcgtatcaactggtggacaccggcggagcgccgggcacaacgctggcgcaaggttcttttaaagtcactaagcagtacctgcgctatgcggcgcacgcggccagcgacgcggtatttgagaagctgaccggcatcaagggcgccttccgtacccgtatcgcctacgtggtgcagaaaaacggcggccagtacccttacgaactgcgcgtgtccgactacgatggttacaaccagttcctggttcaccgttcctcccagccgctgatgtccccggcctggtctccggacggttctaaactggcctacgttacctttgaaagcggtcgttctgcgctggtggttcagaccctggcgaacgcctctgtgcgtcagatcgcctccttcccgcagcacaacggcgccccggcgttctcaccggatggttctaaactggcgttcgcgctgtcgaaaaccggtagcctgaacctgtacgtaatggatctgggatcgggtcagattcgtcaggtgaccaacggtcgcagcaacaacaccgaaccaagctggttcccggacagccagaatctggccttcacctctgaccaggcaggtcgtccgcaggtatataaagtcaacattaatggcggcacgccgcagcgtatcacctgggaaggttctcagaaccaggacgccgacgtgagcgcggatggtaaaaccatggtaatggtcagctcggccggcggtcagcagcacattgccaaacaagatctggaaacgggtggtgtacaggttctgtcatcaacgtttttagacgaaacgccaagtctggcacctaacggcactatggtaatctacagctcttctcaggggatgggatccgtgctgaatctggtttctacagatgggcgtttcaaagcgcgtcttccggcaactgatggacaggtaaaatcgcctgcctggtcgccgtatctgtgataataaataattgattattaaaggaatcaaagaaatgcaactgaacaaagtgctgaaagggctgatgatcgctctgccggttatggcaatcgcggcatgttcttctaacaagaacgccagcaacgaccagagcggtgaaggcatgctgggtgccggcactggtatggacgctaacggtaacggcggcaacatgtcttctgaagagcaagctcgtctgcagatgcagcagctgcagcagaacaacatcgtttacttcgatctcgacaagtacgatatccgttctgacttcgctgctatgctggacgcgcacgctaacttcctgcgcagcaacccgtcctacaaagtgactgtagaaggtcacgcggatgagcgcggtacgccggaatacaacatcgctctgggtgagcgtcgtgctaacgccgttaagatgtatctgcagggcaaaggtgtttctgccgatcagatctccatcgtttcttacggtaaagaaaaaccagcagtactgggtcatgacgaagcggcatatgccaaaaaccgtcgcgccgtactggtttactaagagaattgcatgagcagtaacttcagacatcatttattgagtctgtcgttactggttggcatagcggccccctgggccgcttttgctcaggcgccaatcagtagtgtcggctcaggctcggtcgaagaccgcgtcactcaactcgagcgtatttccaatgctcacagccagcttttaacccaactccagcaacaactctctgataaccagactgacattgattctctccgcgggcagatccaggagaaccagtatcagctgaatcagatcgttgagcgccagaaacagattctgctgcagatagatagtctgagcagcggtggcggcgcagcatcaggtgcgcaggctccgtcgtcttctggcgatcagagcgcggctgccaccagcgcagcgccagcggccacctcaggcgccccggcgatgaccggcgatgcgaacaccgattataatgccgctattgccctggtgaaggatgcctcacgccaggatgacgcgatggtggcgtttcaaaacttcgtcaaaaagtacccggattcaacctaccagccaaacgctaactactggctcgggcagttgaactacaataaggggagaaaagacgacgcggcgttttacttcgcttcggtagtgaagaactacccgaaatcgccaaaagcgcctgacgcgatgtttaaagtcggcgtgatcatgcaggacaaaggtgataccgcgaaagcgaaagcggtttaccagcaggtgatcaataaattccccggcaccgacggtgcgaaacaagcgcaaaaacgacttaatgctcttggttgattacggcatgaccagaaatcgcgttatttctggtcttgtcgcctgaatcgccagcagttaagtgatctttatcgaaattttagttgcgctgaattctgaaatcagtaatatatgccgccgttgccaagggatatcaaacaagcccaaagcaatgccagagtgggtcgttagctcagttggtagagcagttgacttttaatcaattggtcgcaggttcgaatcctgcacgacccaccaatcgttctggtggaacgcgatagtaaaacgtgaaggataacgttgcgtcagcaacggcccgtagggcgaggcgaagccgagtcatcctgcacgacccaccgcttagtagtatccagcgtagtatcgggtgattagctcagctgggagagcacctcccttacaaggagggggtcggcggttcgatcccgtcatcacccaccaccgggtcgttagctcagttggtagagcagttgacttttaatcaattggtcgcaggttcgaatcctgcacgacccaccatctttaacatcgaacgtcggtgttaaacgtgaaggataacgttgcttcagctacggcccgaagggcgagcgaagcgagtcatcctgcactccaatcatttttatgatggggtaggtggacgcagtatcggtagtatccagcgcagtttcgggtgattagctcagctgggagagcacctcccttacaaggagggggtcggcggttcgatcccgtcatcacccaccactcgggtcgttagctcagttggtagagcagttgacttttaatcaattggtcgcaggttcgaatcctgcacgacccaccaatttcagcatttaactcagatgctgaacgtgaaggataacgttgcgtcagcaacggcccgaagggcgaggcaaagccgagtcatcctgcacgacctaccaatttctgaattggtgtcgagtgaaattattcaggtagtaccagagcgggtcgttagctcagttggtagagcagttgacttttaatcaattggtcgcaggttcgaatcctgcacgacccaccaatttcagcatttaactcagatgctgaacgtgaaggataacgttgcgacagcaacggcccgaagggcgaggcgaagtcgagtcatcctgcacgacccaccatcctgaatgatggcagcagtaaaatcccgcaaggggtcgttagctcagttggtagagcagttgacttttaatcaattggtcgcaggttcgaatcctgcacgacccaccaatgtaaaaaggcgccctaaaggcgcctttttgctatctgcattttccctgccactcatcaatgttaatactttcttaattcatcattttcccacggtcacgctgcgcttaccgtgcctgcacaggatacgaaccggtcgttcgggcagatgcgcagcaccgtccccgggaaaagggtctgatgtacaaaattcatcacgacttttagctcgtaatcggctatcttgtttagcatataaaacaccatgaccgtattaagccgccgacaggccatactgacggttatagagttaagccagtaaaacgagattgcatgatgagcgtaatgtttgatcctgaaacggcgatttatcctttccctgctaaaccgcagccgctgaccgtcgacgaaaagcagttttaccgcgaaaaaatcaagcgcctgctacgcgagcgcgatgccgtgatggtggcgcattactacaccgatcctgaaattcaacagctggcggaagagaccggcggctgtatcgccgactcgctggagatggcgcgctttggcgcccgccattcggcctccacgctgctggtcgccggggtgcgttttatgggggaaaccgccaaaattctcagcccggaaaagaccattttgatgccgaccctgaacgccgagtgttcattggatctgggctgtccgattgaggaattcaacgccttttgcgacgcccatcctgaccgcaccgtcgtggtctatgccaatacgtccgccgcggtgaaggcccgcgccgactgggtggtgacctccagcatcgccgtggaactcattgaccatctggatagtcttggtcaaaagatcctctgggcgccggaccgccaccttgggcgttacgttcagcgtcagaccggcgcagacgtgctgtgctggcagggggcgtgcatcgtgcacgacgagtttaaaacccaggcgttgatgcggatgaaggctctgcatcccgaagccgccgtgctggtccatcccgagtcgccgcaggcgatcgttgagatggccgatgccgtaggctccaccagccagctgattgcggcggcgaaaagcctgccccagcgccagctgatcgtggccaccgatcgcggtattttctataaaatgcagcaggcggtgccggagaaaacgctgctggaagcgcccaccgccggcgaaggagcgacctgtcgcagctgcgcgcattgtccgtggatggcgatgaatggcctgaaagccattgccgagggtctcgagcagggcggcgctgcacatgaaatccatgtcgacgaagcgctgcgaaccggcgcattaattccccttaaccggatgctggattttgcggctacactacggggataacctattgtcgcgtcgccagacgctgaggggaggaaatggatttttttagcacgcagaatattttagtacatatacccatcggcgctggggggtacgatctctcctggatagaggccgtggggacgattgccgggctgttgtgtatctggctggcgagcctggagaagatcagtaactatgctttcgggctggtcaacgtcacgctgttcgccatcatcttctttcagatccagctgtacgccagcctgctgctgcagctgttcttttttgccgctaacgtttacggctggtatgcatggtcgcgacaaagcagcaaccatgaggctgagctgcagatccgctggctgccgcgcagcaaagcgctgggctggctggcggcctgcgtggtagcgatcggcttgctgaccctgtttatcaacccgttctttgctttcctgacgcggatcgcggtcagcctgatgcaagcgctcggtttgcaggtcactatgccggaactgcagccggatgctttcccgttctgggactcctgcatgacggtgctgtcggtggtggcgatgatcttaatgacccgcaagtatgttgaaaactggctgctgtgggtgatcgtcaacgtgataagcgtggtgatttttgcccgtcagggcgtctatgccatgtcgctggaatacctcttgctgacgttcattgcgttgaacggcagccggatgtggataaacagcgcgcgtgagcgaggttctcacgcgttttctggctaatggtggtggtgatgatcgtgcccggcgtgcatcgtgttgagatggcactccgggccgctgcagggctggtactccatctgcaccgtggcatgcgcaatttcatatttatgttccaggaaatgcaggatgcggttgagtaacgcgtcatggtcgtgcggtggaacgacctgtacatggagcgtcatcaccggtttttcccccaccagccagacgtggacgtggtgaacatcgcgtacctccgggatagagcgacggatatcccgctgcagggccgccacatccagcgaacgcggcgcgccttccagcaattcattcagactctctttcagtaatcgccaggcactacgtaataccaggcaggaaaccagcacggaaagaatcgggtcgacaggcgtccagccggtggtgaggatcaccacggccgccacgatcgcgccgaccgagcccagcaggtcgccaagcacgtgtagcgctgcggcgcgtacgttaagattccgctcctcgctaccccgatgtaggatccaaaacgccagcacgttggccagcagaccggcgactgcaatgaccatcatcgtcacgccggctaccggctgcggatgctggaagcgctgaatcgcctcccagacaatcagcatggtgatcaccaccagagcaatagcattgagaaacgccgccagggtggttaaacgcaaccagccaaaggtatggcgggcatttggtgggcggctggcgaagcgaaccgccagcagcgcaaacagcagagcggcggagtcggtgagcatatggccggcatccgccagcagggccagcgagccggagatcgcgccgccgacggcttcaatcagcataaagccggcggtgacgataaacgcccatagcagccggcgggcgttgctgttatccggagcctggacagaggagtgcgaatgcgagtgcgccatagtgtcgtcccttaatagttatcattattacgctatgacatcataaacagagagcgataaaaaacgaagaaaaggcgagaccggctcgccttttcttcgatctgcccacctcatgtgttactgggtggtgccgtcggttttgctgttgtcttgggtcgtattgccgccgttgtccagttttttaccggtgtccggacagcggccgtctttacacatcgagtttttatgcacctcatcgctcgacatattatcctgggtcatcgtcgagcccgtggtgcccccagagccagagttgatctgactattgtccacgttgttcggcgccacgttctcacgggcatccggcgccacctgaccggcatccgcggaagagttggcctggccattattggactgggcaccggtgtctgccgccagggccgcgccgctggcaagacctaaggtggcggtgagcaaaagggtcgtcagttttttcatattcatcggatactcctgttaagccgggaaggggaaatgcgcttcccgcggtgagtgtgccagggatctgactcgctatggtttaagactccgcagacgatcgcagtgtcactatataatcctgaaacgtaagacttaattagctttaacagttaaatattgtagttcatgagcctggtttcgctactttatggcgtatttttgcctatttccaggattattccatcactactgtaaaatcacgtttacactatttcagcgaagagatagattggagggattgcatttcattgaataagtatggcaacgctggaaagaagatgaattatcagaacgacgatttacgcattaaagagatcaacgaattattacctcccgttgcgctcctggaaaaattccctgctaccgaaaatgctgcaaacaccgttgcacatgctcgcaaagcgatccatcagatcctcaaaggcgacgatgaccgtctgctggtggtgattgggccttgttctattcacgatccggcagcggcgaaagagtatgccgcccgcctgctgaccctgcgcgaggcgctgaagggcgagctcgagatcgtcatgcgggtctattttgaaaaaccgcgcaccaccgtcggctggaaagggctcatcaacgatccccatatggataacagcttccgcatcaacgacgggttgcgcatcgcgcgcaaactgctgctggacattaacgacagcggcctgccggcggcgggggaattcctcgatatgatcaccccgcagtatgtcgccgatctgatgagctggggcgccattggcgcgcgtaccaccgaatcccaggtgcaccgtgagctcgcctccggactctcctgcccggtgggctttaaaaacggtaccgatggcaccatcaaggtggctatcgatgcgattaacgccgccggcgcgccgcactgtttcctgtcggtcaccaagtggggccactccgccatcgtgaataccagcggtaacggcgactgccatattattttgcgcggcggcaaagagcctaactacagcgcgaagcacgtggcggaggtgaaaatcggtctggcgaaagcgggtcttccggcccaggtgatgatcgacttcagccatgccaactccagcaagcagttcaagaagcagatggaagtgggcgccgacgtatgccagcagatcgccggcggcgagcgcgccattatgggcgtgatgattgaaagccatctggtggaaggcaaccagagcctcgagagcggtgaaccgctgacctacggcaagagcgtcactgacgcctgcatcggctgggaggataccgaaacgatcctgcgtcagctggcggaagcggtgaaaacccgccgcggctaagctactccgcgctagcgcaggtcataaaaaaagcgtggagatttccacgcttttttgttctcaccaggagaaattacttcgctttaccctggttggcgacggcagcagctttcgccgcgatctcttccgcgttgcccagatagtaatgtttgatcggcttgaagttttcatcgaactcatataccagcggtacgccggtcgggatgttcagttcgaggatctcgtcttcgcccatgttgtcgaggtatttcaccagcgcgcgcagggagttaccgtgagcggcgatgatcacgcgctcaccgcttttcaggcgcggcagaatggtttcgttccagtaaggcacgacgcggtcgatggtcagcgccaggctttcagtggtcggcagttcggcgtcggtcagttttgcatagcgcggatcgtggcccgggtagcgctcgtcgtctttggtcagctccggcggagtgacagcgaagccgcgacgccactgtttaacctgctcgtcaccgtatttttcagcggtttccgctttgttcaggccctgcagcgcgccgtaatgacgctcgttcagcttccaggatttctcaaccggcagccaggcctgatccagttcgtccagcacgttccacagggtgtggatggcacgtttcagcacggaggtataagcaaaatcaaagctgaagccttcagccttcagcagtttacccgctgctttcgcttcgctaacgcctttctcggacagatccacgtcgtaccaaccggtgaagcggttttcgttgttccactggctttcgccatgacgaaccagtaccagcttagttacagccattctctcactcctctctacacgccatccctcgcgccgcgaacggtgcgctgaatgtgatggtgtatgtgttattgattgataactattctcattatattgccgtgatttggcgcacggcaatgcttatccctaaccatagcgaaaatagtggcgcagtgtaaggtgcttgtaatacacaggttatttttttgtcctttggtgacggaaaatagagcaggttgctgaaaaaagaggcggcagagaggagggcggggacgaaaagcagcgccccctgatggagggcgctggcgattatcgggcgataaactgatattccgtcaggctgacgtactcctggcccggacgtaatacacagtccggctgcggccattgcggatggttcggcgaatccggcaggaattcgctctccagcgccagcccctgccagtcggcgtagggctccgtcgtctgcgacggggtgccgccgagatagttgccggagtaaaactgcagcgccggagcggaggtatagaccgtcatctgcagcttgccatcctgcgaccagacctgtgccgcaggctggctggcgtcgcctttggcatccagcaggaaggcatgatcgtatcccttcaccttttgctgatcggcatccgcgaggaagtcggcggcgatggttttcggctggcggaaatcaaagctggtgttagcaacatctttcagttcgccacccgggataccgtcgctttccaccggcagatacctctgggcgaggatctggagctgatgctggcgcacatcgccctgctcaccgtcgaggttgaaatagacgtgattggtcatattcaccgggcagggttggtccacggtggcgcgataggtaatcgcgatgcggttatcgtcggtcagacgatagtgcgcggtggcctgcagggtgcccggaaagccttgatcgccatcgggcgaggtcagggcgaacagcacttcctgctcgtcggcgcggacaatgcgccagcggcgcttatcaaacccttccgggccgccgtggagctggtggcccgcgtcgtttgacggcgtgacgttgacgacctggccgtcaagcgggaaacggctgtggccgatacggttggcgtagcggcctaccgaggcgccaagaaatgcggcctggcgagcatagtcttccagctttgcgcagcccagcagcggtcggcgcaggctgccatcggccagcggcacctcggcgctgagcagcgtcgcgccccagtccgccacggtgacggtcatccccgacttattgcgcagggtcacctgctgccatggctggccgtccggggccagcgcggtggtttgcgttagcattgcccggccccctgtgacggtttgcagacatagaatgtctctttaataccggttttcgcttcatactcgttggcaacggcctgctgaacggtatcgaccagttcttccgggattaacgctaccacgcagccgccaaagccgccgccggtcatgcgcacgccgcccttatcgccgatcgcggccttaacgatctccaccagggtgtcgatctgcgggacggtgatctcgaaatcatcacgcatcgaggcgtgggactctgccatcagctcacccatccgcttcaggtcgcctttttcgagggcgctggcggcttccacagtgcgggcattctccgtcagcacgtggcgtacgcgcttcgcgacgaccggatccagctcatgggcgacggcgttaaattgctcaagggtgacatcgcgcagggcgggctgctggaagaagcgcgcgccggtttcgcactgttcacgacgggtgttgtactcgctgccgacgagggtgcgcttaaagttgctgttgatgatcaccaccgccacgcctttcggcatcgagacggctttggtgcccagcgaacggcagtcgatcagcagcgcgtggtcttttttgcccagcgctgaaatcagctgatccatgatgccgcagttgcagccgacgaactggttttccgcctcctggccgttgagggcgatttgcgcgccatccagcggcagatgatacagctgttggaacacggtgccgacggcgacttccagcgaggctgaggagcttaaccccgcaccctgcggtacattgccgctgatcaccagatccgcgccgccaaagtggctgttccgctgctgcagatgctttaccacgccgcggacatagttcgaccactgctgggtgtcgtggctgataatcggcgcgtcgagagagaactcatcggtctgattgtcgtaatcggcggcaatcacccgcaccgtacgatcgtcgcgcggcgcacagctgatcaccgtctggtagtcgatagcgcaggggagcacaaaaccgtcgttgtaatcggtatgctcgccgatcaggttgacgcggcctggcgcttgaatgacatggctggccgggtagccgaaggcgtcagcgaacagggtttgggttttctctttcagactcatcattacactccggattcacgaaaatggacgtcgctgacggcgcgcagtcgttcggcagcttgctcggcggtcagatcgcgctgagtttcggccagcatctcataaccaaccataaacttgcggaccgtcgcggagcgcagcagcggcggataaaagtgggcatgaagctgccagtggttatggtcttcgtcgttaaacggcgcgccgtgccagcccatggagtaggggaatgagcactggaacaggttgtcgtaacggctggtcagctttttcaacgccagcgccagatcgctgcgctgggcgtcggtgagatcggtaatgcgctgcacgtgcgctttcggcaacagcagcgtttcgaacggccaggcggcccagtagggcaccaccgccagccagtgctcggtgtccaccaccgtgcggctgccgtcggccatttcgcgctgcacatagtccagcagcatcggctggccctgtgcggcgtaatactctttctgcagacggtcttcccgttccgcttcattgggcaggaaactgttggcccacacctgaccatgcgggtgagggttggagcagcccattgctgcccctttgttttcaaaaacctgcacccacgggtagcttttcccgaggtccgcggtctgttcctgccacgttttaaccacgtcttccaacgcttcaaggctcagttccggcagcgttttgctgtggtctggcgagaagcagatcacccgactggtgccgcgggcgctctggcagcgcatcagcggatcgtcactctccggtgcgtccggggtgtcggtcatcagggccgcaaagtcgttggtaaatacgtaggtaccggtgtaattcgggttggtgtcgccggtcacccgggtgttgcccgggcacaggaaacagtccggatcgtgggccggcaaggtctgttttgccggcgtttcctgcgccccctgccaggggcgcttggcgcgatgcggagaaaccagaatccactgtccggttaacgggttataacgacgatgtggatggtcaacggggttaaatacgctcatgaaggttccttagtctggataaccctgcggatgacgggactgccagtgccaggtgtcctgcgccatttcgtccaggttgcgcgttacgcgccagttcagctcgcggtcggccttggcagcatccgcccagtaggccgggaggtcgccatcgcggcgcggcgcgaaatggtagttaatgggtttgccgcaggccttgctgaaagcattgactacgtcgagcacgctgctgccgacgccggcgccaaggttgtagatatgcaccccggctttgtcagccagtttttccatggccgcgacgtggccatcggcgaggtccatcacatggatgtaatcgcgcacgccggtaccatcttcggtcggatagtcgttaccaaaaatggccagcgattcgcgacggccaacggcgacctgggcgatgtagggcatcaggttgttcgggatcccctgcgggtcttcccccatgtcgcccgacgggtgggcgccgaccgggttgaagtagcgcagcagggcaatgctccactccggctgggctttctgcaggtcggtcaggatctgctctaccatcagcttgcttttgccgtaagggctttgcggggtgccggtcgggaagctttcgacatacgggattttcggctgatcgccgtagacggtagcggaggagctaaagataaagttcttcacgccagcggcgcgcatggcagagactaatttcagtgtgccggtgaggttattgtcgtaatattccagcggcttggcgacggactctccgacggctttcagcccggcgaagtggatcactgcctcaatggcgtgatcgtggaggatctccgtcatcagcgcttcgttacgaatatcgccttcaataaaggtggcttctttgccgccgagacgttcaatcaccggcagtacgctgcgcttgctgttgcagagattgtcgaggatcaccacctcgtgtccctgctgcagcagttgaacgcaggtatgacttccaatgtaaccgctaccacctgtaaccagaactttcatgattcgctccattcggcttatcgtttgtgaggaagatagcatatcaaagaagtgaaaagtgtgacatagcacaagttagtggaatcgtttacactcaagggcgaaatgatatcattgaatatattttgctttaaaaacatgtcattatattattttggcgctatttttctgaaaaataccagggatctttcgatccccggcagggggcgtcaggccacggggccgagctgataagtgtaaccgtctccactgggaacgaacgccaggcgatgggtaatacagtccggggcatcttccgcatggtgcgagacaaacagcagctgtgtggccccttcgccaatcaacacgtcgacaaagcggcgcaccagctggcggttgagggggtccagcccctgcagcggttcatcgaggatcagcagggttggatgcttcaccagcgcgcggacgataagcgccagccgctgctggccccacgacagactgtgaaacggcgcgtcggcggtacgcttatcgatgccgagaatatccagccattgctgcaccagcttatgctgcttgtcggagaccgcctgataaatgccgatcgagtcaaaatagcccgacaggatgacgttgcggacgtttgtgctgacccggtagtccagatgcaggctgctgctgacgtagccgatatgctttttaatatcccagatggtctcaccgctgccgcgccggcggccaaagagcgtgagatcgttgctgtagccctgcggatgatccccggtgaccaggctcagcagcgtagatttaccggcgccgttgggaccgacgatctgccagtgttcgcccggattcacggtccatgagaggtgattgatgaccgggcgatcgttataggagaccacgccgtcgttgagcacgatacgcggcgccgagtctgtcagcgcatgacgggccggtgggacatccggctccggcagggtgatgccgtccagtttttcactgtgcgccagctgggcgaccagcgcctgctgcagcagggaagacttctcgcccgtctcgctaagggtgcagtcagccagcacgccggcgaattgcacaaactccgggatctcatcgaaacggttgagcaccagcaccagggtgatgccggcgctgtgcaggtcggccagcagggcagccagctgctggcgggagttgacgtcgagaccgtcgaaaggttcatcgaggatcagcagttgcggatcggtcatcagggcctgacacagcagggtcttacgcgtttccccggtcgacaggtatttaaaccggcggtccagcagggcgctgatgccaaactgttcggccaggcgcgcgcagcgggcaggatctttcacctcatcctggataatctccgcggtggtgcggccggtgtcttcttcgcctgggctgagcaggtcggtgttattgcgctgccactcgtcgctgaccagcttctgcaattgttcgaaggagaggcgggttacgcgggagaagtggctttcgcgctggccgctgagcagggtcaggtcgccggccagggcccgcgcgagggcggatttgccgctgccgttgctgccgacgaacgcccagctttcacccgccgccacgctcaggtggtctatttttaaggtctttgtatcgctcaggcgaaacgtgccttgcgaaatttgcaatgatgacatgatgtatcccattttttgcagcgatgtgcatcagggatacgacttcaggcgcgtaatgtcaatggggtcagcataacgtcgcgagaatgatgcgatcggcattgaagtaagcgatcgcctccgttccttccgccaggccagcggcctgcgcctgtggcagggtggcgcacagggtttgaccgtccgccagggtcatcagtacttcgcactgtccggacccgcattcgatatgactgatacgtcccgacagctggttatcggcctggcgggctgctgcgggatcgagggtgatgccgacccatggcgctttgagcaggaccagcacctcctggccctcatcgagtcccagcttctcagcgctttgcgcggtgatggcgacgttcaggcgggtttttccgtcagccaacagtacttccacgtgctgctgcacctgctggcgatcgcggccggtaatggtgccgaaccactggttgcgggcgctggtctgcagggaaaagcgcgagatggccgccagcaggctatccagcggcagggcatcgtcatcgctgagtacatcaaacgctttctgctggatctgcgccagcagatcgtacagctggatcagacgctgcccgtagcgggtcagcaccgcgccgccgccgccctttccgccggtggcgcgatccaccagcggctgttcgctgagctggttcatctcattgatggcatcccaagcgctcttatagctgatacccgcatgcttcgccccctggcttatcgaaccggtctggtcaatctgtttgagcagggcgatccgccgcggatcggcaaacaggcgctgctgtagcttaagggtgagaagaatttcggcctgcataatcgtttcctgacaaaaaagggtattgtgaccgatagtcgcccacttgcaaaacctctctgcgcggttggtcattacccaccgcacaaatgggacgtgttttttcggctgaaatcgttacaatcaggaaatcatactatctggagtgaaccatgttagagcttttgaaaagtctggtttttgcggtcatcatggtaccggtggtgatggcggtcatcctgggactgatttacggtcttggcgaagtgttcaacctcttctccggcgtaggccacaaagatcgcagccagcaaaatcactgatttcccggcgcccggtttaaccgggcgctgtgctatttccctcctgtatcatttccttcgttttattgtcctgtgtcactataaaaacgcttcgcatatcgttatattatcgactacataacgcattgacaggagagtaagatggcaggttcttggttacgcggggttgtcggggtatcactcacgctgtgcgtcgcgggtcaggcgctggcggcagagggtaaagtgaccgttttcgccgccgcatcgttaaccaacgcgatgcaggatattgccctggcgtacaagaaagaaaaaaacgtcgaggtcgtgtcgtcgtttgcctcgtcgtcgacgctggcgcggcagatcgaagcgggtgcgccagcggacctgtttatctccgccgatcagaaatggatggattacgcggcagataaaaaggccatcgatccggcaacccgcgccactctgcttggcaacagcctggtggtggtcgcgccgaaagccagtgcgcagggggcgataaccattgatgagaaaaccgactggaccagcctgctgaaaggaggccgtctggcggtgggcgatccacagcatgtcccggccggtatctatgccaaagaagcactgcagaaactcggtgcctgggagacgttgtcgccgaagctcgccccggctgaagacgtgcgcggtgcgctggcgctggtggagcgcaacgaagcgccgctggggattgtctatggctccgatgccgtggccagcaagggggtgaaagtggtcggcaccttcccggaagcctcgcatcagaaagtcgagtacccgctggcgattgtcgatgggcaccgcaatgcggccgtgagcgccttctatgactacctgaaagggccggaagcgtccgctatctttgaacgttacggatttaccacccgctgatgtttctgagcgaacccgaatggcaggcggtgctgctgagcctgaaagtctcctccctggcggtggccttgagcctgccctttggcatctttttttcctggctgctggtccggcgcacctttcccggcaaggcactgctcgacagtattctccatctgccgctggtgctgcctccggtggtggtggggtacctgctgctggtggccatggggcggcgcgggtttattggcagctggctgtatgactggttcggcatcagctttgcttttagctggcgcggggcggtgctggcggcggcggtgatgtctttcccgctgatggtgcgcgccattcgcctggcgctggaaggtgtggacgtcaaactggagcaagcggcgagaaccctcggggccagccgctggcgggtatttttgaccattacgttgccgttgactctgccggggattattgtcggcacggtgctggccttcgcccgctcgttaggggagtttggcgcgaccatcacgttcgtctccaatattcccggtgaaacgcgcaccctcccttcggcgatgtacaccttgattcaaaccccgggcggggagggggcggcggcccgcctctgccttatcgccatcggactggcgctggtttcgctgctgatttcggaatggctggcccgcgtgagccgccagcgcatgggaggataatgatgctggagctggactttacccagaccctcggcagtcactgcctgcagatccgtgaaaccctgcccgccagcgggatcaccgccgtctttggcgtctccggcgcgggcaaaacctcgttgattaacgccatcagcggcctgacccgaccccaggcggggcggatcgtgctcaacggcagggtgctgaacgacaccgcgcagcgtatctgcctggcgccggagcagcgccgtatcggctatgtctttcaggatgcgcgcctgtttccccattataaagtgcgcggtaatctgcgctacgggatggcgaaatccatggtcagccagttcgataagctggtggaattgctggggattgcgcccttgctggatcgcctgccgggtcggttatccggcggcgaaaagcagcgagtggccatcggccgcgccctgctgaccgcgccagagctactgctgctggatgagccgctggcctcgctggacattccgcgcaaacgcgagctattgccctacctgcagcggctggcgcaggagattcatattccgatgctctacgtcagccactcgctggatgagatccagcatctggccgatcgtgtgctggtgctggaggccggtaaggtgaaagctttcggtccgctggaggaggtctggagcagcagcgtgatgcacccctggctgccggcggagcagcagagtacgatccttagcgccaccgtcgccgcgcagcacccgcagtatgcgatgacggccctggcgctgggggaccagttgctgtgggtcaaccggctcgaacgtcccgcaggcgacaccgcacggatccgcattcaggcgtcggacgtttcgctgacactggcccagccgtccgggaccagcatccgcaatatcttgcgcgccgaggtggctcagtgtctggaggtcaacggacagattgaagtgcagctcagagtgagtgaccgtctgctatgggccaggattagcccatgggcgcgggacgacctggcgatagcgccaggtcagcaggtgtttgcccagatcaaaagcgtgtcgatcgccgcctgattacagcagttggcggtagataaactcggcgatgctggtggactcattgtcgccgatgactatgttggcgcgggctttcacctcgtccaccgcgttgcccatcgccaccccggtgcccgccgcttccagcatgctaagatcgttgtagttatcgccgaaggccaccacatcctgcatcgacagcccctggtcggccacccattgcgccaggcgtttgcctttgctgttgccggcgcgcgcgatatctacctgatcgtgccacgaccattcgcactcgaggcccagcgtctcgccaacctgctgcgcaaaccgctgcaggcggggaatgtcgtcatcggtgagagcgaatttccataccgcgttaacttcgcgaaccgcctgcgccagcgaatcgacctgagcgaaaactggacgctgatcttccggtaacgcctgcgcccagttgcgggtgcggatcacatgcccggtggggtgttcataaagcatcgcgtcgtccacatatgccaggccgtggatctgctgtttggcgagcatggcagtgaggcttaccgcttgctctaccggcataggatcggcggccaaaaccttttttgcgtgataatcatacaaataggtgccattacaacaaattgcaggtgtatcgagagccagtgcctgataaaaaggatggatagcgacgtgatgacgtccggtgacgacgatgacctgatagcctgcctctctggcgcgggccagcgcctccagcgaagcgggcagaatggtttttttgctggtaagcagggtgccgtctaaatccagggcaatcacgcgtgttgtcatgtgttatttccggttgatgttgaaaagtgacctggccatgatggtacaccgccgtggcgtcaggaccaatttttccacatctgccgtgaatgtctgtatgccctttgtgccgccgtccggcggaaattcggcggacgatgcgagtatcatgggcggatgtcttataattttcagggtgctgttatcctgaaaatgaaaattccacgtgcagtgagggaaggagtagtcatgaaacaaaccgtttataccgccagcccggaaagccaacaaatccatgtctggagtcttgaagcggacggcaaactgacgctggtgcaggtggttgatgccccagggcaggtccagccgatggtggtcagccccaacaaggaatttctgtacgttggcgttcgtccggagtttcgcgtgctggcctatcgcatcacgccggataacggggcgttaacctttgcgggcgaagctgcgctgccgggcagcccgacccatatctctaccgatcaccatggccgctttgtcttcagcgcctcctacaatcagggctgtgtcagcgtgaccccgctgcacgacggcctgccgggcgaaaccatcaccgtggtggaagggctggaaggctgccactcggccaatatctccccggataatcgcaccctgtgggtgccggcgctgaagcaggatcgcatttgcctgtttaccctcagcgacgatggtttcctctcggcacaggagcccgcggaagtgacgaccgtcgagggcgccggtccgcgtcacatggtattccatcccaaccagcagtatggttactgcgtcaatgagctaaacagctcgattgacgtctgggagctgaaagatcctaagggcaacatcgaatgtgtacagaccctggatatgatgccgcctgattttagcggcgtgcgctgggcggcggatattcatatcaccccggatggccgtcatctttacgcctgcgatcgtaccgccagcatcatcacggtgttcagcgtttcggaagatggtagcgtgctggcggtggaaggctatcagcctaccgagacccagccgcgcggctttaacctcgatcacagcggtaaatatctcattgccgccgggcagaagtcgcaccatatcgcggtgtacgacatcgtcggtgagcagggactgctgcaggagaaaggccgctatgcggttgggcaggggccgatgtgggtagtggtcaacgcccactgaaccgccatcaggtaaaagaaaaaacctcgccttagcgaggttttttttgctcagagcggacaggctctgcggagaaggcgttgtcctggcgggccagaagcgtggcgacgttagatatcgtccatggtgtagccaacgacaatctccaacgtttttcggatcacgtccgcggtcaccacgtcatcggtggtttccagcgcctgaatcagccataaaataatggccttattgttcaggtgaccctcggactggagaatactgttgatggcgagcgacatgacggcggactcatcaaccagtttatcaccggcgttacggaaatagtcggagagcgcggtgtcctgcagtcttgcgtaaatatctggttgctgatgcatagtctgtctcatcacattctcactctgtttaattcaccatggttgggataatcagtggatctttttagcttccgacggcatgctgtctggcgccagcgaacctctggtttcccaacggccattgattttctttacctgtaaaggcgcgtacttccgctgacggataagcttcgcgcaaatttcttcgatcacggcagcgatgatctttctacgctggcgatctggttctgtcgcctgcattaaccgaagtcgaaccagcagggtcggggtggtaatcgggcgattcgttttcagaagcgctagaaccgcctcgccgatgatttcatcggttatttcctcagtttcactgttattcataaccgtctctatgcatgccacccttttcctgaataggcgaacggcattcaggtcagcagcaggtttgtggaagcgatcgcccctcatctgctactgcggcgctgcaacaggcgacgatcgatgacgttattcctggccagcaaacagcagaccaattaaggtctgatagtggctctcttcctccggcgcgcgagcgcggtccaggcggctcaacagtttggtgcatagcgctttgcggttgagatgacgcccttcgttaagaatatccatcacgatctgacccagggtttcctgctgggaaggcaaagatgctttgttgaaatactgggcaattgcgttcgctgtatctggaatgtaaccattctgctgcatatgtgctcctttcatttcattcatctgttaactgccattaaacttatacaataattattaacctgtacacacaaagttgcacaataatgattcatgttagtttaactatatgatttttaattgtttaattttttttgcctggcgcggttctggcttgtaaaggtggggtttagcgttgcatgttgtacaaggaaagaaaaaaagggaaaaccttgcacaaaaaagggatttttagtgtatcttttttgttaagacaaaacgtagttttacgagacccttagcctgataactgctactgtgaatgcttatccctcccatctggaatcactatgctaaccaccatcatttatcgcagccatatctgcgacaatgtctcattcaaatcgatcgaggccatggtcgccagggcaaacgaaagaaatgggcaggcggacgtcaccggtattttactttttaacgggacgcatttttttcaactcattgaggggcctgaagaaaaggttcaggatatttatcagcatatctgccaggatcctcgccactataatctggtggagttgctttgcgattatgcgccgtcccgtcgttttggtaaggtcgggatggaactgtttgatttacgcgaacacgatcgcgaggaagttctgcaggcggtgatggaccgggggacgtcaaaatatcagctcacctatgatgaccgggcgctgcaatttttccgtacttttgtcgaagccacagaaaaagcgaactattttgagattccttccgcagatagttgggtttttattcctgataaggagacgttctatcctgataccccgattatcgataatacggaaggttgttcctttgccttccagccgattgtcgaccctttcgcctgcgaaattatttcgtgggaagcgctgttgcgtacaccggacgggcaatcccccggcgcctattttgccgggctgaccggggacgatatttatctcgctgacctgcacagtaaacgggtggcgttgtcgctggcgggaaaattaggtttacgtaataaggcgttaagcattaatttactgccgatgaccatggtcaaagcgccgaatgcggtggctttcctgctcgacgaaattagtcgcaatgaccttattccggagcagattattgtcgagttcactgagcgggaagtgatttcgcggatggacgattttaccgatgcggtgcgcaaactgaagggcgcgggaattaatcttgccatcgatcacttcggcgccgggtttgccgggctatcgctgctggcgcaataccaacccgacagaattaaaatcgaccatgagctgatccgcaatatccaccaggacggaccgcgccagtcgattgtacaggcgattatcaaatgctgtacttctctggagattgcggtctcagccgtcggcgttgagcgtgctgaagagtggatgtggctggaatcagccggtatttcacagttccagggtaatttgttcgccagcgcgcgcctggggggcctacccgccgtcgcatggccggagaaaaaatgaaccaccgcgaaatcagctaaacattttttcatcttttttcccgggcgctgtgagccgcaacctgatatctttatctgtacaagaaaatagagttgtacaggatgcctgaattcgttagtttaggtattaaggtatcaggttgatgtgaggctgctatggcgttttacagtatcggtgaagtcgccgaacgttgcggaatcaatccggtcacactgcgcgcctggcagcgtcgttacggtctactgaaaccgcagcgtagcgaaggcgggcatcgacaatttgatgaagaagatatcctgcgtatcgaagagatcaagcgctggatagagcgcggtgtatcagtagggaaagtcaaagcgctgctggaggataacctgccggcggcgcgcgacgaatccgcgcatcttcaggaagagatgatgtccattctgcgttatatgcagcccgccagaatccgcgccaaattaatggcgctcagtcatcaacaccccgtcgacaccctcatcgatagcctgttagtgccggtacgacagcgtctcaagctggatcagaatacctcgctggtgattagcagcatgctggacggcctgttaattgactgcgtagcgttgtttctcgccgaagcgcgtaaaaaaaatggcaaagagacgctgctggtgggctggagcaatgaggacaggacgcgtctgtggctggaggcatggcgtctttcccaacgcggctggcatgtcaacgttctcgccgaaccgctggagtcgccgcggcctgagctatttcccgggcagcatattttcgtctggaccggacgtgccgccacgcctctgcaggaggagctgctcagccactggcaggagcagggcttcagcatccattttcacggccaaaattaagcgccccgatccgtggtgcggatcagggcttgagtgctgggttacaggtgaatctggctccaggatttgaacgtttcgctgcggctgatattaaaaaaatcggttctaccgctgcagccgagctttttaatcagattcagccggatctgataaatggtttttatatgcaggtttagcgaccggccaatgctggcgaccgcttcgccattgctgataagttgaataactttcttttcccgctcggtaaactgcaccgaggcgcctggcgccggatgggttttgtaatagcgggtgggttgatgcagaaatatctttaactcttccggcgtcgagttggccggtaagcgcagcataggcagttcactaagaaaattaagatcgttgccttcggttaacagaataaataatgtatcccgccgattatagttgtgctgcagtaccgcgaaataattgtcgctggtgaagaaaacatgttttttgcggaagtaagatgccggcaggctattcaggatcagcgacatcccatagagaagaaaaccattatcaaaccacagatcgtaatgctcagaacgatagcaagtattatggtgtgacatttttttgcctcagttagccgatagagacccaggcgcgccggtacagcaggtcgaagcctgctgccagcacagtgggtttatttaatgatgaggtttgctgtacagcatatccagcgcctgcagatagagatcggaaagtatttcgttactttccgtttgcagacgatgctggatttccgtaatcatccgctcattatttaccgttctgtgctgcttaatgagcgtattctcaatattcttcatcagggccgaattgaagacaaactctgctggaatggtatttttaatatgcatagctcgaactctcccacgtataaagcaaacagacaataaaagtcgcagcgtaccgttggtacgcgccaagtcacgaacaggaaatgtataaccaggaaccaccgtccgactcgctgcgcaatcgtcaagcttccccgctttgttgcgcaacaagcagttaacactccaaaactatagacgctgatttcactatgtacaacttttttcattactatatgtacaacgtaacggcttattttttgtgtgtgttttaatttgttgatttatagcaattttattaagtgataacttgtacagaaaagtcgggttgtgcaggatttcgctgtaaaaccagcgggaagaagctgatgatggtagaagaaagccaattgtgaaaattctgtcatggctggcgaaatgcatgaaattgcgccgatgcgcgaaggggtaaacagcaacgctgtcgtcgacaggtggctttcttccgcgtcggagtctgagcatagcggaaaatatgatgaggctttgtctgctttttgcacagtaaggtaaaggggtaacgtctgccatgtcgtaaacggcccattcgatttgttggcgaataagggctgtgctacgctttttggtaacgacgcggcggtttggcatcgttatttttcccccatttccctgtcgagtcttatacccctgtcacgaccggtaaatacggcaaaagctttctgtccctggacaggccttgaggactgaggagggaaaatgcgcggcaaaagcgtgatgctcctggccgggttagcctctctcgcgcaggcgaacgaacttaacctctattcggtgaataccggttcctatgtttaccatctgaccaataatcaaggacaatatacagagaatttcgaaaatcattttttctcagtggagcggaaattctctgcagactccaaatacagccttctgcttggcactatgaataacagcttcaacgatcgctgcctggcgctgggggtgagaagagactggtaccacagcggcagcgggtggaccttcaaaggcgtttacggctataccggcgaattcttcttcgacgcctttgagcattgcggcgatcatggctcctataaagactttaaggacgccacggggatcggcttttcaccctatatctaccacgctatccagtataacttcaccgattatttcgccgttgaaagcggcattattattcccagcgtgtttgtgatcagtatccagtggagcttccgctaaatcgtcccgttgtcggttacaaggtaatcaccttcctgagcagcgtactggagagcgcggcaagggaaatgagcaccgacaggacaaaggtcagcgctattacccccagcttggtggctagcgaatgcacagggatgagcatcaccagcaggtgaaacacggaatagtggaggatataaactccggtcatcgctttactgaccgtcgccagcacggcctctttccactcgcggttctttttaaactgcacggcgttagcggcgatcaccagcaggacgatcaggatataaatttgcgatcccgtgagaatgaacgcattacgatctgctttaaacagggcgaagaagaaatggcgttcataaaaccaggtaaataaatagacaaagggcagggcgataatcgaccctttaatcacctgtgggttgcgtatccactccgcgacctttggatcgttaaacaactgcccggttaaataaaacagtagccatgtccacaggcgatactgcggcggcaaactgaaaagatgtctgtccgggtagatcaccgagagcaggtcgtaaccgtaggagcagcacagcagcgtcaggagcacggcgaaaaagagcccgcgccgctggctgagccaggcgatcaaaggatgaaaggtatagatgacaatcagggcgaaaataaaccagggctggatcaggtagccgcgctggtaaggctcccagacataatagaccgtcacccaaaacagaaagacgatgaccacgcttttaattttaccaatttgccagttggcatcgtggcgcgtctgcgcatcaagatagccggccacgacaaaaaacagcggcgtcgcgatggtcgagataaaggtcagcagcccgaggatccagtgatagtcataatcaaagcgatcccaggtgttatagatggtgaaaaaggtcaccgctgtcatacagcctaatgtcttgataatgctcagaccggtactgttcatcgttgaggcgtcatatccttatggtgaaagcaggcgtaaataaccggcagaaccagcagcgtcagcacggtggcaaaggcgaggccgaacatgatcaccaccgccatactctggaaaaagacatcgcgcagcagcggggccaggccaagtacggtggtgaaggcggtcagcaggatcggccgcagacgagaggttgccgcatcaataatagcttgtcgttgatctttctcctgtttttcttgctctatctcttctaccagcacaatgccgttacggatcagcataccgctcaggctgagcaagccgattaaggccataaagccgaaggggatgccggtaagcagaaagccgggtgtgaccccgatcagcgccagcggaacggtcagccagatggcgacggcgtttttcagcgaactgaacatcagcaccgttatgataaacatcaccagatagccaagcggcagggttgtaaacagcccctgctgcgcctcactggagttctcggcatcgccgccccattcgatacggtagccgtggggcagcggcagtgcgtcaatgcgcggtttcacccgcgcgagaatatcacccgaggtttggccgcttagcgggctggggtcggtctggaccgtcagcacccgggtacgatcccggcggaggatcaacggatcttcccactccagggcgaaaccattgctgacgttactcagcgggatatattgctggcgactctggctccagaccagcacattattcagatggttggcatcctgacgttctgcttccggcggccggacgatcactggcagcagatcggccccttcacgatataacccggcgcgactcccggagaaattcatctccagcgcgttatcaatatcctgtttatccacccccagctcgcgtcccagcgccggggaatactgcgggcggatcactttgctgcggttctgccagtcattacgcacgctgtcggtcgccgggtccgcggcgaggatatcgcctacctgactcgccagcgcgcgcagcgtatccgggtctgggcccttaatgcgcacctcaatcgcgctatctccggaggggccgaacataatgcgtttggtgctggcgttaacctgcgggtagtatctggcaatccagtcctccacgtggcgggtgacaggggcgatgccgcgttgatcatccatccgcaccataatctgcgcgtagttgctgtactggcgctgcccgctgtaggtgagaatgaaacgcatactgccctggccgatggtggagacggtggtgaccacccccggctgaccggctatcgaccgctcgatatcccgggtcatcttctccgtggcgtttatatcggtaccgtagggtagccacaggtcgacaaagaatataggcgtattcgatgacggaaaaaaattctgccgaacaaaggtaaagccccagatcgctccggctaacagcgcgcccatcagcaccagggtcagggtcttttgctgcagcagtattcgcagcgcctgctgatagccacggtaaaagctgccgcggtaaggatcggccttttcctccgcggcggcggccgacggggcgtttttaaacagccaccacttaataagcaccggggtgatggtcagagcggaaaaccagctcagcatcagggagatcagcagcacctggaacagcgatttgcaatactccccggtagagtcctgggagaggccaatcggcgcgaaggcgaggatggcgatgatcgtcgcgccaagcagcggcagggcagagcgacggatcacatagttaatcgcgcccagcagcggagagccttgctgacgggcgatgagcaccccttcgacaatcacaatggcattgtccaccaacatactcagggcgatgataagcgctccgagggagatccgttgtagttcgatcccccagatatacatgataagcagggtgccgagaacgttgagcgccagcgacagagcaataataatcccgctgcgcacccccataaataccagcagcacgccgacgacaatcgccagggccatcagaaaattggtaataaagccattgaccgagtgggcgacctcagctgcctgatcgtaaaaaatagcgatgtcgatgcccgccggtttgtcggcggccatctgctggaggcgggcctcgagagcgtggccgacgtcaataacgttgacgcctgggataaaagaaactcccatggtcaccgcctggcgcccgttggcatgatagatactggccggcgagtcggttagcccgcgcgacagcgtagcaatatcccgcagtcgggtggtggcgctggcgccgtgagggctgaccagtagatctcccagctcatcgatgctctgaaactcaccggtggggtggaggcggatcgattcgctgccaacgcggatctccccggcgctggacaccacgttgagtcgggccaggattgcggcgagctggttgagggtgatcccgcgcgccgtcatcttcgccagcgagatatccacattgatctgctgcggaatgacgccgccgatagcgactttaccgacccccggcaccagcaccagctcccggcgcaactgttcggcatagcgcaccagctccgggttggtaaaactgtcgcccgagatagcgaagaaaaagccaaacacatcgccaaagtcatcgttgacgaaaggggggactacgccaggggggaaaaggcggctggcgtcaccgacccggcgacgtagctcatcccagatttgcggcagctcgctggaatggtactgcgaagcaatattcaccgtaatttgcgataagccattcgaggagatggagctgacgttatccagcgagggaagctgctgaatcgcgttttccagcggcagggtaacctcctcttccacctgctgagcggacgcgccagggtagtgggtgacgatcactgccgttttgatggtgaaggcgggatcttccaggcggccgatattgagcagggcgaacaggccacccacccctaacagcaaaatggctaaccagacgcgggtcgggttgttaataaactgacgggaaatatccatttataatcctcgttcacgcgtccagacccgcaccggctgcccggcatgcagctcgctcacgcccgccgcaaccacctgttcacccgcgcggagaccgtcggtgatcgccactccctgcgaagtcacctcgccgacggtgaccttacgctcctcaagatatcgatgcgcgttatcgcctttcaccacccagactaccggctcgttctttggccggttatcggggttaaacaccgcctccgctggcacaatgagggtttcccgtccggcgctggccggtaaattgccgagattgaccgtcacggtgccgctgaccccgccgacggcgggaaaatcatctggccgcggcatggttaacacgatctgccaggtgagggtgctattgtcgctgctgccggtatgctctttgtattccgcggtaaactcgcggcccggcagggtattgaacctgacgacgggacggtaggcggtattgcggatatccagggaggtgaacagattttcgggaatgctgaagaccacatccagcaggtcggtccgcgtcagggtgatcaccggttggccggcggcgaccacctgatggttgcggatatgcacgccggcggcaatcccgctaaagggcgcgatgaggctcatttgcgccagctcttcgcgagcgatttttaaggccgcattggcggcatcgcgattggcgcgctgcacgtccatctccgcctgggaaatcgcctggcgcccggccagagtctggaagcggtcgaactgacgctgggcgagagtggccgccgtttgccgctcattgacccgttgctgggcctcgcgggcattcaggcgcgccagcgtttgcccctgggcgacgcttgccccctgacgaatatctagcgactccacctggccaccccgcttaaacgacagttcggtggaatcgccagactcaatgcgtgccggaaacgttcgctgctgggtattgcccacggcggtcacctgcgccactttaaccatgcgcggggcggactcgacggtgggtgctttctgatcgcaagcggttgtaaatataataacaaccgggatgagagaaaaataacggttcacaatattcccctcagattcaggatttattttacatttttattacatggcgcctgcttattctgcgagagcggcgacgaccagataagtgaagagccccaccgctgtgcaggcgacaatggccagcgcgacaaacaaacccaggcgtaacaggctataacccaacataatttcctccctttactcccacccgaaccgtgaatgtcatttaattcggcccccactgtgaccaccggacattcggagcggcatgcctgcttgtaatcagcatagtcggagaaaatatgaagtgttaaaaaagagaatgccgcgagcgttggcggcattaaggggaaagcgcaggagatccgcagagaatatgcggtttttataatatttttcagtctattaatccgccattttctaatgttaattttcctgtgctacgtttaataacatctattccgctcgccgcttctgttgttgagatttcgttcctccccaagtaaggggctattcatcactacgcattgtattggtaataaaaggattatctcatgtataaaaatawcgttgttcccgttgacgtgtttgatgcgggcctggccgacaaagcgctctctcatgcgaaattcctcgcccaacattctgccgggcaaattcatcttatccatgttattccggccttttctcctgtattaacccgcggatttatctctgatgcccgaaagatggaagaccatttgcttaataccgctaaggaaaagctgagcgagctggtgaagaaaaatgggcttgcggaagacgccagccatctttatgtgcgcagtggcaatgttcgcgatcaagtgattgccctggccgatgagctgaaagcggatgtggtgattgtcggttcgcgcaatccggggatccagactcatttgctgggctcggaagcggccaatatcgtgcgctatgcccatgtaccagtgttcgttgtgcgctgatgatggcgggatgtcgccctgacttccgcttcagaaatcgagggaaagagtatgaatacagataaaccgggggcgccctattatcagcgctccgtcgaggagactctcgccagcgtgcagagttcgccggaagggattagcggaacagaggcggctacgcgcctgcagcagtatggcgaaaacgccctgccgcagaagccgggtaaacccgcctggctgcgttttattgcccattttaacgatgtgctgatctacgtcctgctggcggcagcgttgctcaaggcggtgatgggccattggatcgacatggcggtgatcctcgccgtggcggtggtcaatgcgctgatcggcttcattcaggagagtaatgcggaaaaatcgctgcagagtatccgcaatatgctgtccagcgaggcggtggcgatccgtcagggcaaccatgaaaccatccccaccacctcgctggtacctggcgatatcgtggtgatccgcgccggcgaccgtatccccgccgatctacgggtgattgaggcgcacaacctgcgggtggaagaggcgatcctcaccggcgagtcgacggtggtggaaaaaaccaccgagccgctaagcggcgatttaccgctcggcgatcgcagcaacctgttgttttccgggaccaccgttagctcaggggcgggaaaagggatcgtggtggccaccggcggcaataccgagctgggccatatcaaccaaatgatggcgggcattgagaaacaccgcacgccgctgctggtgcaaatggacaagctaggcaaagccatctttatccttattctggtgatgatggcggcgctgttcgtctttagcctgctgttccgcgatatgccggtctccgaactgatgctgtcgttgattagcctcgcggtggcatcggtcccggaagggttgccggcgattatctcgattattctgtcgctcggcgtacaggcgatggcccgtcagaaagcgattatccgcaagctgccgacggtggaaaccctcggcgcgatgacggttatctgctcggataaaaccgggaccctgaccatgaacgaaatgacggtgaaggcggtgatcactgccgacagcgtctatcgggtggaaggggatagctatgagccggtcggtaagatccacgccattgacgatccgacgccggtcacgatcgcgcccggctcgctgttcgagcgctatctgcgcaccatcgatctgtgtaacgacagccagcttatcaaagaggagagcgggctgtggaaaatcaccggcggcccgaccgagggggcgctgaaggtgctggcggcgaaggtcactctgccgccgctgaccagcgaactgcgcagtaaaattccttttgattcgcaatataaatacatgtcgaccctctaccggctgggtgaagaggaggtaatgctggtcactggcgcgccggatgtcctgttccgcctgtgccagtatcagcagagcgacagcggattgcagccgctggatctcccgtactgggaaggcaaaattgaagagtacgcccgggaagggctacggatggtggccgcagcctggaagccggctgccgcaggccagaccgaactgacccatcaggatctgcagcaaggggtgattttgctaggggtcgccgggatgatggatccgccgcgtccggaggccatcacggcgattgccgactgcctgcaggccgggatccgcgtgaagatgatcaccggcgaccacccgcaaacggcgatgagcatcggcaagatgctggggattggcaatgcgggaaatgccattaccggacgtgagctggaggtgatggacgacgcgcagctgagcgtagccgcgcagcagtttgatatcttcgcccgcaccagcccggaagataagttccgcctggtgcaggctctgcagagtaagaaagaaattgtcggaatgaccggcgatggggtgaacgatgccccggcgttgaagcaggctgacgtcggcgtggcgatggggatcaaggggaccgaggtgaccaaggaggccgccgatatggtgctgaccgatgataacttcgccaccatcgccagcgcagtccgcgaggggcgccgggtgtatgacaacctgaagaaaaccattctcttcgtcatgccgaccaaccttgcccaggggttactgatcgtgatcgcgctgctggcgggcaacgtactgccgctcacgccggtgttgatcctgtggatgaacatggccacctccgccacgctgtcgtttggcctggcgtttgaagccggtgagaaaaatattatgcggcggccgccgcgcgatccgaaaattcacgtgatggacggctttgccatctggcgcgtagcgtttgtggggtcaatgattgcggtcagcgcctttattctcgaagcctggctgcagccgcgcggctattcgccggagtttattcgtaccgtgctgttgcagactctggtcaccgcccagtggttctatatgctgaactgccgcgtatcggatggattctcgttaaccaaaggtctgctggccaacaaagggatctggatcgtcagcggcgtactgctgctgctgcagctgctgattatctacgcgccttttatgcagatgctgttcggcaccaccgggctgccgttccgctactgggtgatcacctttatcatcggcttcgccatgttcctgatcgtggaactggaaaaaccgctgacccgcaaatggcgttccgcctgacggcgtgaagcgctgaacgaaaaagaaaagagggggcatcgccccctctctggctgacgacaaacctgtttcgtcattgtgctcgcatttctgccgggtggcggcattcgccttacccggcctacgaaagacttcaatatcaaaccgttatgcagttatctgtaggcccacgcaagcgcagcgccgccgggcaattcctgaagattgcacgttgtcagcagtttgagagagggcatcgccctctcttttattatggttcacgcttgttgcgctttactgtttcggctcggcgaccacggtgcttcccacgccgcggttattgtactcccacatgcggttgaagccgttgtcgttgaggttgcgctgcagattgcctttgtcatcggcgctgccggtgttgccgctgaacgggcggccggagcctaccgccgccgcccacggctgggcaatattaaagccttcattgatagcgctgtcgcggatcaccacctggccgttgctgttgccatcgacgtccagcgcgcggccgagctgcgcgacgttatccccggaggcggtgaagcggctgttggtcgccaggaagccgtaggtcacgctcttcagagtagccggcgcgaagacgtaggcctctttctgggtacgggaattcaccacgcggaaatcggtgttatcaaacaccaccgcgccgcggccggaaacgatatccacatcgccttcaatgtagctgttggtcaccagggtgcgggtctgacggttgtcctgcagacggttttgcacgccgctgttggtcacgaagaaggtgttttgacggccaagaatattgaccttattgatctgcacctggtcgccatcgctgcgcaatgccaccgcctggtgggtaccggcgtcaacgctgtcgccgaggttgttggcgatggtcaggttctgcagctgcagaccattattctgtgaccagaagactgcggaacacattacgccgacggtcgccgcggatttgctttggcaactgtcgaacatataccacgccggtttacccggcatatatttaccgcctggattgaccagacgacgccaggtgttgcgatccatctcggaatcaatggcttcgctgattttcacgtcgattggcttatcgccagtaccatacagggtcagggcgcccggcgccgccggaacgtagacggttcccgggtactcgcccggcataatcgcgatatacagacgacggttagagtgacgggcaattgccgcatccaccgccgcctgaatggtggtatgggttacgccctgggttcccgcagggccgacgataaagtcaggctgcgccggcaggctgatagcagacggcgtccaggcggcggcgttgggagccagcgactggaaataggccgccggcgtgaagtttttcgcttcttcggcgttgagtatgggacgcgcggtagtgcccggtgcagtctgcgttgagggctgttgatcggcaggcgtcgagctacaggcggacagcgtcacgccgaaggccagcgccagcgccagacgggaaacggaatatgtgttcatgttgctccgggcaaaattaagcgtaatgaaataccccggctgaaacgccagggtataagtcctttaaaacctgctgttttatactaacttgaacgaaacgggaagacgtggacggaaaaacttaccgtctttacgcaacgcgcagccctgccggatggtctttagtcacaaaaaaataacatttccctgcgctattgttgactttaccggcgttatgaaaataaatgtctatacaacccatgacaagttaagcgctatgactgaagccacttccgaactcgttatctggcgaaacgggcgtctcgccaccctgaaccccgatcacgctcaaccttacggcctgctggagcgccatgcgctgctggtgcgcgacggccgcatcgcggcgattgtcgccgaagatgacgtccccagcgggcgcagtatcgatcttgaaggccggttggtaacgccgggattaatcgactgccacacccatctcgtcttcggcggcagccgggcccaggagtgggagcagcggctgaacggcgtgtcgtatcaaaccatcagcgccagcggcggcggcattaactccaccgtgcgcgccacgcgcgacagcagcgaaactgaactactggcgctggcccagccgcgtctggaacgcctgctgcgtgaaggggtgaccaccctggagatcaaatccggctacggcctcgacctgccaaacgaacgcaaaatgctgcgggtcgcccgacaactggccgatcataatggcgtggaactgtcggcgacgctgctctccgcccacgccacgccgccggaatatcaaggcgatgctgacggctatattacgctggtctgcgagaccattttgccgacgctgtggcaggagggactgtttgaaagcgttgacgtcttctgcgaaaacgtcggcttcagcccgcagcaaactgagcgcgtctttcaggcggcgcaggcgctgggcattccggtaaaaggccacgttgagcagctctcgtcgctgggcggcgcgcagctggtgagccgttatcatgggctttccgccgaccatatcgagtatctgacggaagagggcgtggcggcgatgcgcgaaagcggcaccgtggcagccctgctccccggcgcattctacttccttaatgaaacccgtaaaccgccggtcgagctgctgcgcaagtaccaggtgccgatggcggtggcgaccgatttcaaccccggcaccagccccttcgccagcctgcatctggcgatgaacatggcctgcgtcaagtttggcctgacgccggaggaggcgtgggccggggtgacgcgccatgccgcgcgggcgctggggcgccaggccagccacggccagctggcgccgggctttgtcgctaacttcgccatctgggatgctgagcatcccgtcgagatggtgtatgagccggggcgcagtccgctctggcatcgcgttgttcaaggagaattgcaatgatgctgtggcaagctacgccagccagtctctggcagggacgcgacgacagcgcggaagcgcccaatgcgctgcgcctgttccagaccatcgcccgcgcggaacgcttcgcgccgcaggagatgcccggcgatatcgcgctgctcggcttcgcctgtgacgaaggggtccggcgtaacaaggggcgtaccggggcagcggacggcccggcgaccctgcgccgggcgttggccaatatggccagccatcagggtcatgaccgctgcgtggatatgggcaccatcagcgtcgacggcgagcagttagaagtcgcgcatcaggcgctgcgcgaggcggtggccgactgtcagcgggcgggtaaacgcacgctggtcctgggcggcggccacgagacggccttcggccacggcgctggggtactggatgccttcccgggcgaaaaagtgggcattattaatctcgatgcgcatctggatctgcgctttgccgactgcgccagctccgggacgccgttccgccagttggcgctggagtgtgacgcgcagcagcgcggttttcactatacctgcatcggggttagccgggcggcgaacacccaggcgctatgggatgaagcggcgcgccgccaggtggctatcgttgaagatctggaggtgctgacagccttcgaaactcgcgtattgccggagcttgagcgcaatatcgcgcaattcgaccgtctgtatctgactatcgatctcgacgtgctgccggcgcgagaaatgccggcggtgtcggccccggcggcgctgggcgtgccgctggccacgctgctgcgcatcgttgagccgctgtgccgcagcggtaagctgcaggcggtggatctggtggagtttaacccgctgtttgacattgacggtcagggcgctcgcgtggcggcccgtgtggcatggcaaatcgcccattggtggcgctagcgatccgcgctattattttcgtttcgccgctccgcttattacgcataaggaaagccaggccatgtttgcacaacaacctcgttccgcgcccgcgcctttctatgaaaaggtgaagcaggcgatcagcgaaaagatccacagcggcgtctggcgaccgcatgaccgtatcccgtcggaagctgagctggtggcccagttcggcttcagccgaatgaccatcaatcgcgcgctgcgcgagctgacggacgaaggcctgctggtcaggttgcaaggggtgggaacctttgtcgccgagccgaaagggcagtcggcgctgttcgaggtgcgcagtattgccgcagaaattgtcgcccgtcaccatcagcaccgctgtgaggtactcctgctggaggagacccgggcggatcatattcaggcgacggcgctcagcgtcccggaaggcacccgcatttttcactcgctgatggtgcattacgaaaacgaggtgccggtgcaaatcgaagatcgctgcgtcaatgccgcagtggtcccggactatctgcatcaggactacaccgccaccacgccccatgattacctgtcgctgatcgcgccgttaactgaaggtgaacacattgttgaagcggtgcaggccacggcggaagagtgcgcgctgctgcatattcacgcccacgatccgtgcctgctgatccgtcgccgcacctggtcgacaacccacatcgtctcccacgcgcgcctgctgttccccggtagccgatatcgtctgcaggggcgctttggctcctgatccacgctggcgtcagcaaaacgtgattgctgacgcaatataacaaaattgtatcatttctgttaaatcctggcttgcgcatgcttgtatagacaagtatatgtatctacgtaaacaacgttcattgtcaggagaaaccccgatgtcgcaaagcaaatatcgccagctggacgtccgtgcgccaagaggcacgacgctgaccgcgaagagctggctgaccgaagccccgctgcgtatgttaatgaataatcttgatcccgatgtcgccgaaaacccgcacgagctggtggtctatggcggtattggtcgcgcagcgcgcaactgggaatgctatgacgctatcgtgaaggcgctgaagaacctggaaagcgatgaaaccctgctggtgcagtccgggaagccggtgggcgtattcaaaacccatgaaaactcaccgcgcgtgctgatcgccaactccaacctggtcccgcactgggccacctgggaacactttaacgagctggatgccaaagggctggcgatgtacggccagatgaccgccggcagctggatctacatcggcagccagggcatcgtgcagggtacctacgaaaccttcgtcgaagccggtcgccagcactaccagggcagcctgaaaggccgctgggtattgaccgccggtctgggcggcatgggcggcgcgcagccgctggccgcgacgctggccggcgcctgctcgctgaatatcgaatgtcagcagagccgcatcgatttccgtctgcgtacccgctacgtggatgagcaagccacctcgctggatgacgccctggcgcgcatcaaaaaatacaccgccgaagggcgggccatctctatcgcgctgtgcggcaacgccgcggagatcgtaccggagctggtgaagcgcggcgtgcgcccggatatggtcaccgaccagaccagcgcccacgacccgctgcatggctatctgccgaaaggctggagctgggaagagtatcagcagaaagccgaatccgacccgcagggcactattctggcggcgaaacgctcgatggccgatcacgtgcaggcgatgctggccttccatgagatgggggtcccaaccttcgactacggcaacaacatccgccagatggcgcaggaagtgggcgtcagcaacgccttcgatttcccgggcttcgtgccggcctatatccgcccgctgttctgccgcggtatcggcccgttccgctgggtagcgctgtccggcgatccgcaggatatctacaaaaccgacgcgaaagtgaaagagatcatcaaagatgatcagcatctgcaccactggctggatatggcgcgcgagcgcatcagcttccagggactgccggcgcgtatctgctgggtcggtctggagtggcggcaaaagctcggtctggcgtttaacgaaatggtgcgcagcggcgaagtctccgcgccgatcgtcattggccgggatcaccttgactccggctccgtcgccagcccgaaccgcgaaaccgaagcgatgcgcgatggttctgatgcggtctccgactggccgctgctcaacgccctgctcaataccgccagcggcgcgacctgggtgtcgctgcaccacggcggcggggtaggcatgggcttctcgcaacactccgggatggttatcgtctgcgatggtaccgatgaagcagcggcgcgtatcgcccgcgtcctgcacaacgacccggccaccggcgtgatgcgtcatgccgacgcgggttacgatatcgccattgaatgcgcggcggaacagggtctgaatcttccgatggttgcggcaacgcaggggaacgctaaatgaaatctttaactttgatcccgggtcaactcagcctgtcgcagctccgcgacgtttacagccacccggtaaatattaccctcgacagcggcgcgtttgccgccattgacgagagcgtggcctgcgtcaacgccatccttgccgaagggcgtaccgcctacggcatcaacaccggttttggcctgctggcgcaaacccgtatctcgacggaagatctggagaacctgcagcgttcgctggtgctgtcccatgcggcgggcgttggcgagccgctggacgatgatctggcgcggctgattatggtgctgaagattaacagcctgtcccgcggtttctccgggatccgcctgagcgtgatccaggcgctgattggcctggtgaatgccggcgtgacgccgtggatcccggccaaaggctccgtcggcgcttccggcgacctcgcgccactggcgcatatgtcgttgaccctgctcggagaaggtaaagcgcgggtacgcggcggcgactggctgccggccaccgaagcgctgcgtcaggtggggctggagccgattaccctggcggcgaaagaggggctggcgctactcaacggcacccaggcctcgaccgcttttgccctgcgcggtctgttcgaagccgaggatctgttcgcctccgcggtcgtctgcggggcgttaaccaccgaagcggcgctgggctcacgtcgtccgtttgatgcgcgcatccatgaagtgcgcggccagcgcgggcagattgatgcggcggcgttgtatcgccacctgctgaccgacgatagcgcgatctcgcagtcgcaccataactgcagcaaggtgcaggacccgtactccctgcgctgccagccgcaggtgatgggcgcctgcctgacgcagatccgccaggcggctgaggtgctattggctgaagccaacgcggtctccgataacccgctggtctttgccgccgaaaatgacgtcatctccggcggtaacttccatgccgaaccggtggcgatggccgcggataatatcgcgctggcgatcgccgaaatcggctcgctctccgagcgccgcatcgcgctgatgatggacagccatatgtcgcagctgccgccgttcctcgtcaaaaatggcggcgtcaactccgggtttatgattgcccaggtcacggcggcggccttagccagtgaaaacaaagcgctgtcgcacccgcatagcgttgacagcctgccaacctctgccaaccaggaagaccacgtctcgatggcgccggcggccggtcgccgcctgtgggcgatggccgagaacacccgcggggtgctggccgttgagtggctggcggcggcacaggggctggatatgcgcgaaggactgaccaccagtccgctgctggaagaggcgcgtcacttgctgcgcgaacgcgtgccgcactatacgcaggatcgctacttcgccccggatatcgataacgccattgcgcttctggcggcccgtcacctgacgcgtctgctgcctgccgtactgcattaatcaccgttgttctctgtacccgcgtcgggggaagtcattcccccgaccgccctacaccgcatatttgtcgtcatataaaaaaatcaggacacctgtatatgcaacaacaacacaagccacatctgctgcgcgggctcaatgcccgacacattcggtttattgcgctcggctccgctatcggcaccgggctgttctatggctcggcctcagccatcaaagcggcgggcccggcggtgctgctggcctatctgatcggcggcgcggcggtgtttatcgtcatgcgcgcgctgggcgagatggcggtgcgcaacccggtttccggctccttcggcagctatgcccgccagtatctcgggccactggccgggtttattaccggctggacctacacctttgaaatggtgatcgtcgccctggccgacgtcaccgcattcggtatctatatggggttgtggtaccccgatgtgccgcgctggatctggatcctcagcatcatcttctttatcggcgcgatgaacctgtgcaacgtgcgggtatttggcgagatggagttctggctgtctctggtgaaggtggtggcgattatcgccatgatgctggcgggggcggggatcatcttctttggctttggccacagcttcccggccaccgggctggaaaacctctggagccacggcggctttgcccctaacggctggcagggcgttatcgcctcgcttggcatcgtgatgttcgccttcggcggggtggagattatcggcgtcaccgccgcggaagcgaaggatcctaagaaggtgatcccgcaggccatcaataccattccgctgcgcattatcctgttctacgtctgcaccctggcggtactgatggcgatcttcccgtggaacagctttggcgaacaggggagtccgtttgtgcttattttcgacggtctggggatcccggcggcggcgaccatccttaacatcatcgtgatcagcgccagcatctcggcgattaacagcgatatttttggcgccagacgcatgatgtacggcatgtcgaaagaggggctggcgccgaaaagcttccagcgcatcgccagcaacggtgtgccctggatgacggtggtggtcatgggcggcgcgctgctggcggcggtggtattgaactatctgatccccgagcaggtatttgtgctaattgcttcgctggcggcattcgccacggtatgggtgtggctgatgattctgctatcccattttgccatgcgccgcggtttgtctgccgaagagcgcagccagatcgcctttcccattccgttctggccggttgcgccgctgttgacgctgctgtttatggggctggtcatcgccgtactagggatgtttgccgaaacgcggatggcgctgatcgccggcctggtctggctcgggctgctgacggtggtgtggtatgcgcgggtgcgtaaaacggcgctgcaggtagccactgaacagtaagatcaatttccccggtggcgctgcgcttaccggggctacaaatggcacggaccgtaggccgggcaaggcgtcagccgccgcccggcataaaagcggctccgtgcccgcggcaatcgcccggcggcgctgcgctagcatgggcctgggggagtgtagatactgctatcggcttgtaacggttttaatccggtaaaaacagttgttttgtattaattccgagcacattgcgctcccgaaatgtcttctacgttatgttactcatggcgcagggagcgcacagggggcggccagtcgccgccgccccctgtacgcccgggcttcggccagcaacatcgccactgcgtggtgccttcgacttatccctgcaggcttcgggtcgggccgaggcagcgtccttgcaaaacacggccctcagcccgcatccatgcgggctgccccggccttccgggaacgtctcagcgatgttgaggccgccagccccggcagtttcagcggccccatgtttggcggcgattcacatactgggtctggaccccgtaggccgggtaaggcgtcagccgccacccggcaaaataaccgcgcaatagcaccgtaggccgggcaaggcgtcagccgccgcccggcataaaagcggctccgtgcccgcggcaatcgcccggcggcgctgcgcttgcgtaggtctacgtttattgtagattctgttatcggattgccactttctcagtccggcaaaagcgtgtatcacgtgtgacttcagcgttctttgcgctcccggttattttttctgcactttgtttttcatggcgcagggagcgcacagggggcggccagtcgccgccgccccctgtacccccgggcttcggccagcaacatcgccactgcgtggtgccttcgacttatccctgcaggcttcgggtcgggccgaggcagcgtccttgcaaaacacggccctcagcccgcatccatgcgggctgccccggccttccgggaacgtctcagcgatgttgaggccgccagccccggcagtttcagcggccccatgttcggcggcgattcacatactgggtctggaccccgtaggccgggtaaggcgtcagccgccacccggcaaaataaccgcgcaatagcaccgtaggccgggcaaggcgtcagccgccgcccggcataaaagcggctccgtgcccgcggcaatcgcccggcggcgctgcgctagcatgggcctgggggtagtgtaggtcgggtaagcgcagcgccacccgaaaaacaaatggcgcctcgggtaccccggataaggcgcaagccgctatccggggaagattaactgaacagggcggtgatggaggcgctggcgagggaatggaaatggacgttaaagccgaccatcgcgccgctggcctcagcatccacctcaattttctcgacgtccagggcgtggacggtgaagatatagcggtgggtttcgcccttcggcggcgccgcgccgccgtagcctgccttaccaaaatcggtgcgggtctgaacggcctcttccggcagctccgcctgaccggaaccggccccttgcggcaggacgcgggtatcggccggcaggttagcgaccacccagtgccaccagccggagccggtcggcgcatccggatcgtagcaggtcaccacaaagcttttggttcccgcgggcacatcatcccacatcagatgcggcgaaatattgtcgccatcgtagcccatgccgttgaagacgtgacgattaggcagcttaccgccgtcctggagatcgtgactgatcagtttcatgcttcatcctcattgataatgcgctgattaacaaagaagtgtagccttcccgacgacgcaattccgctatttattcgctaaaaaatgtttcgtcctgcactgcctggttgaccgcacgggtcaggcgggtcagctgctcgggcgtgatgatgtacggcggcatcagataaatcagccggccaaacggacggatccagactccctgctcgacgaaaaagcgctgcagggcggccatgttgaccgggcgacgggtttcaaccacgccaatagcgcccagcacgcggacgtccgcgaccagcgcagatccccgcgccggggccagctcggcctgcagctgggcttcaatcgccgccacctgcggctgccattcgccgctctccagcaggcgcaggctttcgctggccaccgcgcaggccagcggattgcccataaaggtggggccgtgcataaagcaaccggcttcgccattgctaatggtttcagcaaccgttcgggtagtgatggcggcggaaagggtcatggtgccgccggtcagcgctttgcccagacacagaatgtcggcggtaatcccggcgtgttcacaagcgaacagcttgccggtgcggccaaagccggtggcaatctcatcggcgatcagcagtatcccttcccggtcgcacattttacgcacccgcttcagccactccggatggtacatccgcatgccgcctgccccctggacgataggttcgaggatcaccgcggcgatttcatgacgatgcgcggccatcaggcgggcaaacggcaccatatccatctcgtcccactcgccgtcgaagcggctttgcggcgcgggggcgaaaagattatccggcaggtagccctgccacaggctgtgcatcgagttctgcggatcgcagaccgacatcgctccgaaggtatccccgtgatagccgttgcggaaggtcagaaaacgacgacgtggttcgcctttagcctgccagtactgcagcgccattttcatcgccacctctaccgccactgaaccggagtcggcgaggaaaacgcactccagcgaggccggggtcatcgccaccagctgacggcatagcgctactgccggcggatgggtgatcccgccgaacatgacgtgcgacatttggtcaatttgccccttcagcgccgcattgaggcgtgggtgattgtagccgtggatcgccgcccaccaggaagacataccgtcaaccaactgttcgccgccggcgagggacagctcgcaaccgtgggcggacaccaccgggtagaccggcaggggggaagtcatagaggtgtaggggtgccagatgtggcgccgatcgaaagcgagatcgtccagtgtcataagcgacttgtaaaccattttgaaaacatttaggtttacaagtctacactgaacttacttacaatgaaacgtacacaaaatatttcgcgcagcatcgaggcggcaagcgagaacatccccaggagcatagttcactatgtgactgggaggcgcgagtgccgccaacaaagaggctgtgtgaaataggaagtgtacgaccttttggagaggaaaatggctcaccaacctcgctggacaatgtcgcaagtaacggaattatttaataaaccgctgatcgatctgctattcgaagcacagcaaatccatcgtcaacactttgatccgcgccaggtgcaggtcagcaccctgctgtcgatcaaaaccggcgcctgcccggaagattgtaaatattgcccgcagagcgcacgctacaaaaccggcctcgaagccgagcgcctgatggaggttgagcaggtgctggaatcagcgcgccaggcgaaaaacgccggctccacccgcttctgtatgggcgcggcgtggaaaaaccccaatgaccgcgatatgccttatctggagcagatggtgaaaggggtgaaggcgctggggctggagtcctgtatgacgctcggcaccctgaccgacagtcaggcgcagcgcctggccgaagcgggcctcgattactacaaccacaaccttgatacctcgccggaattttacggcaacatcatcaccacccgcacctaccaggagcgcctggatacgctggataaagtgcgtgatgctgggatcaaagtctgctccggcggcatcgtcgggctgggagagagcgtaaaagatcgcgccggactgctgctgcaactggctaatctgccaacgccgccggaaagcgtaccgatcaacatgttggtgaaggtcaagggcacgccgctggcggataacgacgacgtcgacgctttcgatttcatccgcactatcgccatcgcgcgcatcatgatgcccacctcctacgtgcgtctctccgccggccgcgagcagatgaacgagcagacccaggcgatgtgctttatggccggggcgaactcgattttctacggctgcaagctgctgaccacgccgaacccggaagaggacaaagacctgcagctgttccgcaagctggggatcaacccgcagcagacggcggtgctggaaggcgacaatgagcagcagcagcgtctggagcaggccttactcaccccggacactgaggaatattacaacgcggcggcgctatgagctggcagcagcgaatcgatcgggcgctggatgagcggcgggcggcggaagcttttcgccgccgcctgccggtgacgcacggcgccgggcgctggctggagcgggaaggggagcgctggcttaacttctccagcaatgactatctgggcctgagtcagcatccggcgattatcgccgcctggcaacagggggccacgcgctatggcgtcggcgccggcggctcgggccacgtgagcggctatagcgaagcccaccgcgcgctggaagaggcgctcgccgactggctgggctatccgcgcgcattgctgtttatctccggctttgccgcgaatcaggcgctgatcgccgccctggtggagaaagacgatcggattgtcgccgaccgcctgagccacgcctctctgctggaggcggcgagcctcagcccggcgcagctgcggcgctttacccacaacgatccgcatcagctcgcgcaactgctggctaagccgctggcgggcgaacagttggcggtcactgaaggcattttcagcatggacggcgacagcgcgccgctggcggccattcacgccgcgacgcaggcagcaggggcagtgttgctggtggatgacgcccacggtgttggcgtggtcggcgacgaaggacgcgggagctgcgccgcgcaggcggtgcgccctgagctgctggtggttaccttcggcaaggccttcggcgtcagcggcgcggcggtgctgtgcgacgaagcaatggccgattatctgctgcagtttgcccgtcatctgatctacagcaccgcgatgccgcccgcccaggcggtggcgttgagcgctgccctggggatcattcgcagcgatgaagggcagcagcgtcgcgacatcctggccgcccgcatccgtcagttccgtgagaggatgggcgaggtgtcgctggggttgaccgactccgtcagcgcgatccagccgctgatcgtcggcgacaacgcccgggcgctgaacctggcctgccgtctacgcgacgcgggctgctgggcaacggcgatccgtccaccgacggtgccggtcggcagcgcgcgtttgcgcctgaccctgacagccgcccatcatgctgaagacattaaccgtttactggaggtgctgcatggccacagtgaataagcaggcggtggccgcggcgtttggccgggcggccagcggctatacgcaacatgatgaactgcagcggcgctgcgccgatctactgctgcgccagctggcgcgccgcgattttgcgcaggtgctggatgccggctgcggccccggcagtatgagtcgctattggcgtgaggcgggcagcgtggtgaccgcgctggatctctccgccgggatgctcgcccaggcgcagcgtaacgacgccgcgcagcattatctgctgggggatattgaggcgctgccgctgccggacgcctgcgtcgatctggcgtggagcaatctggcggtgcagtggtgcgacgatctacgggcggcaattggcgagctgtaccgggtggcgcgtcccggcggcagagtggcgtttagcacgctgctcgccgactcgctgccggagctcaatcaggcgtggcaggccatcgacgaccggccgcatgccaaccgtttccttagcgaagcggcggtgcgcgcggcgcttagcggcctgcgcgcgaccggcgaggttcatcagattagcctgccgttcgccgatgcgctgagcgctatgcgctcgctgaagggcatcggcgccacccatttgcaccaggggcggaccgccgccccgcttggccgcggcaaactgcgcgagctgcagctggcctggccgcagcggcagggcatctgcccgctgacgtattctctttttacaggagtcattgagcgtgactaaacgtttttttgtcaccgggaccgatactgaagtcggtaaaaccatcgccagcagcgccctgctgcaggcggcgaatctgctgggttttcacactgccggctataagccggtggcctccggtagcgagcttaccggcgatgggctgcgtaatgaagatgcgctggcgctgcagcgtcatagtcgggtcgcattgcgttacgaccaggtgaacccctataccttcgccgagccgacctccccgcacatcatcagcgccgacgaagggcggccgatcgccgcggccaggctctccagcgggctgcgtgagctggaaggtctcgccgactgggtgttggtggaaggcgccggcggctggtttacgccgctctcggattccctgaccttcgccgactgggcgcaggcggaacagctgccggtcattctggtggtgggcgttaagctcggctgtatcaaccacgcaatgcttaccgctcaggcggtacgccaggcgggactaccgctggcggggtggatcgccaatgacgtacagccgccgggcaagcgccacgccgaatatctggcgacgctgaaaaaccgactggccgcgccgttcctcggcgaaataccgtggcttgccgatatcgcgcagcgcgacgatctcggccagtatctggacctcagggcgctggatccggcgttatccactgcgccagcagcggctcatccagcgccataatatcgccttcggcgacgttacggccccggtgcaagacacagaagcgatccgccacccggcggataaagggcaggtgctgctcggcgagcagcaccgtcaggccgatatcgcgatttaaccgcaacagcagatccgccagcttttgcaggcagcgcggccctctgccgcgcgagggttcatcaaggatcagcagccgcggctggacgatcagcgccctggccagcgccagctggtactgatcgtcgtcgctcagcgaggcgcctttgcgctgccgtagggcatagagctcgggaaaatgctcataaatctcgccgccgctggcgttagccccgggtttcccggccgccagggcgatgtgcaggttctcttccacgctgagttgggaaaaaatgcgtttatcttgtggcacgtagccgataccaatggcgctgcgcgattgagcggacaggggggtgagatcctgcggcggggcgccaatgtcatgccaggtcatccggccgctagccaccggcaggtggccagcaatgcagttaaccagggtggtttttcccatgccctcgcgtcccagtacgccaatgcactctcccgggcgtagtacaagatcgacattccacagcgaatgctggttgccgtaaaagtgatttactgcctgtaaattcaacatggacgttttctccttatcctggcgtcagggcgacagaaagatgctgcaaaactcttgccaggaaaaagaacgctcggaaaaaagcgctaaacgccgataccatcgggcctcgtcagcgccggggctgcacttttccggtgcccgacgctaaagggtggtgcaaaaagcagcaaaaatcgagcggctttaagcggatagttatcaaaaatagttcgataaaaatttttcgccacgcggttgaccgcaaaaggcgacaggcgccgggcggcggtggtcttgggctgcggacagttatccactattcctgtggataaccttgtgtattagagttagaaaacctgcggtaagctagagcgtacgcggcttgcggctgaattggcgcgaaaggcgtcttttctttaaagatcttaaatatcagcttgttagataaaatcaatgggtgtaagaaaagcgtcatctgctgccataaaagtttcacccgtccgcttgacaaatgttaaaaggtaaaattttctggggataaccctggcggccggaggattattccgtctgacgcgcgttttgcacccagcttgccggccaataagacccttttgtggcgttatcataagtacgcactgtttaaatatccagtataatttattggcaaaaaacggtccggggggtagaattaaacaccggccgctaattcttttttcaggttctgattgatgagtaaatcgtttgtactgcattccgcctttcgcccctccggagaccaaccggaagccatccgccgcctggaagaggggctggaggatgggcttgcgcatcagacgctactgggggttaccggctccggtaaaacctttaccatcgccaacgtgattgccgacctgcagcggccgacgatggtgctggcgccaaacaaaaccctggcggctcagctctacggcgagatgaaagagtttttcccggagaatgccgtcgagtatttcgtctcctactacgattactatcagccggaagcctacgttcccagctcagataccttcattgagaaggacgcctcggttaacgaacatattgagcagatgcgtctgtcggccaccaaagcgctgctcgagcggcgcgacgtagtggtggtggcgtcagtctcggcgatctacggcctcggcgacccggacctgtatctgaaaatgatgttgcatctaacggtcggtatgctgattgaccagcgagcgatcctgcgtcgtctggccgaactgcagtatacccgcaacgatcaggccttccagcgcggcacttttcgcgtgcgcggcgaggtgatcgacgtcttcccggcggaatccgacgatatcgctctgcgcattgagctgtttgacgaagaggtcgagcgtctgtcgctgttcgacccgctcaccggccacgtcgaagggacggtgccgcgctataccatttatcccaagacccactacgtgacgccgcgggagcgcatcgtccaggcgatggaagagatcaagctggagctggcggagcggcgcaaggtgctgctggccaacaacaagctgctggaagagcagcgcttaacccagcgtacccagtttgacctcgaaatgatgaacgagctgggttactgctcgggcattgaaaactactcgcgctttctctccgggcgcgggcccggcgagccgccgccgaccctgttcgactatctgccggcggatggcctgttggtgattgacgaatcccacgtcacggtgccgcagatcggcggtatgtaccggggcgaccgggcgcgcaaagagacgctggtggaatacggtttccgcctgccgtcggcgctggataaccggccgatgaagtttgaagaatttgaagcgctggcgccgcaaaccatctatgtgtcggcgaccccgggcgcctatgagctggataaatccggcggcgaggttgtggatcaggtggtgcggccgaccggtctgcttgacccaatcatcgaagtgcgcccggtggcgacccaggtcgacgatctgctgtcagagatccgcctgcgcacggccatcaacgagcgcgtgctggtcaccactctcaccaagcggatggcggaggacttaaccgagtaccttgaggagcacggcgagcgcgtgcgctatctgcactcggatatcgacaccgtcgagcgcatggaaatcatccgcgacctgcgtcttggcgagtttgacgtgctggtggggatcaacctgctgcgtgaggggctggatatgcctgaggtgtcgttggtggcgatcctggatgcggataaagagggcttcctgcgttctgaacgctcgctgatccagaccatcggccgagcggcgcgcaacgtcaacggcaaggccatcctctacggcgataagatcaccccctccatggccaaagccattggcgagaccgagcgtcgacgggagaaacagcagcgctacaacgaagagcacggcatcgtgccgcaggggctcaataagaaagtggtggatatcctgcagctgggccagggcctggcgaaaaccaaagccaaagggcgcggtaaagcgaaggccgttgagcctgccgggcttagcgctgtggatatgacgccaaaagcgctgcagcagaaaatccacgagctggaagggcagatgatgcagcacgcgcagaacctcgagtttgaggaggcggcgcaaatacgcgaccagctgcatcagctgcgcgagctgtttatcgccgcctcctgattctgggcgcagaccggcggagtggacgtgcggggtatagtgaaggcgcgcttctcttatcgtcctgcttgccagataacaaacatttgagaagaaaaaaggccgcgttgcggccttcttaatgtttgcttaatctcgccaggcgacactatcttcaacctgatgaggatagcgcccatgcaaaaaattaacttccgtgaatatctggcggtcgccaccgccctggtcattattgttgccttcatccatcaatgggtgctgacgttctgacccccgcgctgcgggaatagcacccacgcgcggacccctggccctggctgtcggttatgcaaaaaaaactgggcgtcatgcagctgagcgatgcgcgtgacgatgctcagtccgaggccaatgccgccgtagcgactgtccatgcgcacgaaggctttactgagttcgccgcttttcgcctcatcgatccccggcccttcatcttccaccgccatcaccggcatcaggcccgctttcaccgacacacggatcgtcgacccttcagggctgtagcggtgagcattctccaccagattgcgcaggatcacgcggattaacgtcgcatcgccagagacgacggcctcgttttcgatatccgtcagcagcagccgctgctgacgctgcgccagcatagcctccagttcgtcctgcaggggttttaccacgtcatccagcaacagcacctgctggtagctgccggcggagaaggactggccgacgcgcgccagctgcagcagctgggaaatgctggtggtcatctgatcgagacgctggatcagcgggtcgacgcccatgccatgcactttcgccagcagctcaaggtgcagccgcagcccggccagcggggtgcgtagctcatgcgccacgtcggcggtaaacagccgctcgcggtcgagggtcagattgaggcgggaaaccaactgattcagggcggtggtcaccgccgtgacttcgggcaccgattcgctgagtacgataggagtgaggttgtccggcgtgcggttctccagttcgctttgcagtcgtgaaagcgggcgggtgatcttgcgcaccgccagcatgctgatatacagcgccaggccaacgatcagcaggctcggcaccagcaggctggcaaccgcttcccgtacctcatgctccacatgtttctggttgttgtgcccttcgatggcgctggccaccagcagctggatctgctctttgctctcatgccatagccagaagacgcttatcagctggcagaccaccaggatggcgccgatggtcagcagcagccggtggcgcatggtccaggtttcagttgcaaacagagccatggtctattccgtgtcgatgttgttagccagcatatagccaaagccccggacggtgcggattcgcgatttgccaatcttttcgcgtaggttgtgaatatgcacttccagggtattggtcgccggctcgttgtcccagctgtaaatgtcgttgtagaggatctcgcgatgcaccgggctaccggctttcatcatcagccgcgacagcagggcatactctttcggcgtaagatccagcgccgtttcacccagccacaccaggcggcgagtgacgttaaggcgcagatttccgacgctgatttcattatcgccctggttgttatgccggcggagcagggcgcgaatgcgcgcattgagttcctccagggcaaagggttttaccaggtagtcatccgccccggtatcgagaccgctaatgcgatcctcaagcgtatcgcgggcggtgaggatcagcaccggctgggtcattttctcccgccgcatgcgggagagaaaatgcagcccgtcttcatccggcaggccgagatccagcacgatcaggctgtaatgattgctggccagcgatagcgcggcttcgtgcgcggtggagacgccgtcgcacacgtatccttcactttgcatcgccagaattaacccctgcaacagcagcgcatcgtcttcaatgactaagattttcatcaaccagcctctctacatggcgttaagatatcatctgccgcctggtactcgcgggtgctgacgccgagcaggccgagcagggtggagaacagattatcctgcgagtaattctctttttgcgcccgctgctgtagacagtgcgcggaaatgccgtagcgctgctggtagtcggcggagagccacagcgccatcggcacatgtttctgcgtatccggcgcgatggaatacggcagaccatgcaaatagacgccatcttctcccagcgattcgccgtggtcggacaaataaaccagactagtggtaaatttatcctgtttagattgcagtagttttatcgctttatcaacgacatagtcgacataaaggatggtgttgtcataggtattggtcaactgctcccgggtacagccctggatctcattggtgtcgcaggtcggcgtgaatttgcgaaacgccgctggatagcgattgtagtacgtcggaccgtggctgccgatggtatgcagcacaataatgccatcctgttgcaggttatcgatatagctgtcgagattatggaacaggacgtcatcgtagcactcgccatcgatgcactgcccggtgagcttcaggtcggtgacgttctggtgtggtacccggtcgcaggcgcctttgcagccgccgtcattatcgttccacagcacctggatccctgcgcgctgtagaatatccaggacgccttcctgatggtgcgccagctcttcgtcataatgcgcgcgcggcatattggagaacatgcacggcacggaaactgcggttgccgtgccgcaggaagtggtatgcggaaaatagatcacgccgtcctgccgcatcagcgggttggtgtcgcgcgaatagccgcccagtgagaagttatccgctcgcgaagtctcgccgagcacgacgatcgtcaggttcttacggggagcgttatgcatcaccgctttctgcatggcatcttcgccaatcttcaccagcggcaggttgtccatccgatgatgagcataccaggagttcacggccacaatgctgttggaagggctaagggatttcaccagctctttgttgttacggaacaccgaggcgtaatctttgtagaacagcgcggccaccagaataatcagcagcgccgaaacggcgatattgagcaggcgcatcgccgcgccgcgccaccgcgtggcgggcttacggattttcacccaccaggcgacgaataccgccaaaaccccggaaaggccgaggacggcaatcatttcgccggagagtagagcaaagctttccgccggagtggtgtcgaggatattggtgatcatgctgcggtcgatcaccacgccaaagttccagatgaagtattgcgccgaggcgctgagcagaatgaacaggctaatcaccagccggtccagcttcaggaacgaggcgagagtggtgaggatattcatcacgctaatggccacgatcggcatactgaggaataccagccagttatgcaggctatttaccggcagtaacgggaaaacctggcgataaaaagccaggttgagacagataccgatatagcaagcaaagagaatcagataagtcgtgcggctgaccaccggccgacgcagaggcaataacgacataatgcacacccacagaaaaagatgagggtatagtgccagccctattttaagacaaccttaagattttaaggtgcgccgaagagggccgcctccggcgcgcaggatcagcccggcagctggatcgctttctccagcgccccgcggagcagcgcccggtcatgacgatagggaacgtcgctggcctccagcggcgtctggatcaccaaccggtcgtcgatgccgctgatatcggcttttggaccggcgatcaccgcatccaccacccgtttgcctacatagcgctccataatcgcgatgcgctccgccagcgacagcctcgcggccgggctatgctctttgccgaggttatcgataaaaaccatcggcgccggggtgcggcgcaacgcctgggccatctcgtcgagcaacaggatcggcagcaggctggtgtaaaaactgcccggcccaatgaggatcaaatcggcttcggcgatagcctccaccgcctcgcgggtggccggtaccggcggggtgagcatcagctcctgcggcacattatcaagctgatcaatattcacttcgccataaacttcatggccttcatgatcgagcgccatcaaatccaccggttgttctgacatcgggatcaggaaagcgtccactttcagcaggtttctgatcaaattgatcgcctctaatggccgcacgctcaggtgatccagcgcctttaacatcaaatttccgaggttatgtccggaaagctcgccgttaccgccaaaacgatactcaaacatcgccgacgctacgctcggctcggcaattaactgattgatgcaattgcgcatatcgccccaggcaatgccaccttccgaacgacggatccgcccggtggaacccccgttatcggtggtggtgacaatgccggtcagccgtgagccgagcgaggagagggaggacatcacccggcccaaaccatgcccgccgccgagcgctaccacccgatcgaggtcagcgaatgtacgattgcgcatagaaattccttatttcacataaacggccacacactacccgatctacccctaaaagacgatgggaggagcccgacaaactgaccgacatcaaggcaaaaaaatgatttatggctattctgtagcgaaaatgcacgaagatagcgatatgtataagattatatagcgaaatcgccaatggcgaaactgcctgtaacgcgctactatcgacataacctgttaacactctagcctcttcgcctgtgtcaaaagatatggcgatttggccgcgacgccaccagttgtcgccagggcgtggaaagaaatgaccgcgtctcccgtatttggaaaggtgtatatggcctcacagcttaccgatgcattcgcgcgtaagttttattacctgcgtctgtcgattaccgatgtgtgcaacttccgttgcacctactgcctgccgaacggttacaagcccggcgccgtcaataacaatggctttctcagcgtagacgaagtacgccgggttacgcgcgctttctctgcgctgggcaccgaaaaagttcgcctcaccggtggggaaccctccctgcgccgcgacttcaccgagatcattgccgccgtgcgtgaaaacccggcgatccgtcagattgcggtcactaccaacggttaccgcctggcgcgcgatgtcgaacgctggcgcgatgccggcctgacggcgattaacgtcagcgttgatagcctcgacgcccgccagttccatgccatcaccggccaggacaagttccaccaggtgatggacggcattgacgccgccttcgccgccggctttgacaaggtgaaggtgaataccgtgctgatgcgtgatgttaaccatcaccagctcgataccttcctcgcgtggatccaaccccgtcgtatccagctgcgctttattgagctgatggaaaccggtgaaggcagcgacctgttccgccgtcaccatctctccggcatggtgctgcgcgatgaactgctgcgccgcggctggatccatcagatccgccagcgcagcgacggcccggcgcaggtcttttgtcacccggactacgccggcgagatcggcctcatcatgccgtatgaaaaagacttctgcgccacctgcaatcggctgcgcgtctcgtccgttggcaaactgcacctgtgcctgtttggcgaaggcggcgtcgacctgcgcgacctgatggccgaagaccagcagcaggccgcgctggaggcgcggatcgccgaagccttaacccataaaaagcagacccatttcctgcatcagggcaacaccggtattacgcagaacctgtcctatattggcggttaatcgttttcgaaaggagcattcagatgagccaggctagcgctgagtttatcccgacccgtattgctattcttaccgtttccagccgtcgcggcgaagaggacgacacttccggtcactggctgcgcgaggcggcgcaggaggcggggcaccaagtcgtcgagaaggcgatcgtcaaagagaatcgctacgccatccgcgctcaggtatcggcgtggatagccagcgataacgtgcaggtggtgctgatcaccggcggcaccggttttaccgacggcgatcaggcgccggaagcgctgctgccgctgtttgatcgtgaggtcgaaggctttggcgaagtgttccgcatgctgtcgttcgaagagatcggcacctcgacgctgcagtcccgggccgtggccggcgtcgccaaccgcacgctgattttcgccatgccgggctcaaccaaagcctgccgtacggcgtgggacaacatcatcgccccgcagcttgatgcccgcacccgtccctgtaacttcattccacacctgaagaaataatctatgtcacaactgacccatattaacgccgcgggcgaagcccatatggtcgatgtctccggcaaagcggaaacggtgcgcgaagcgcgcgccgaggcttacgttgaaatgcaggcgacgaccctggcgatgattatcgacggcagccaccacaaaggcgatgtgttcgccaccgcgcgtatcgccgggatccaggcggcaaaacgtacctgggagctgatcccgctgtgtcatccgctgatgctcagcaaagtggaagtcaatctgcaggcgcagccggaacataaccgggtgcgcattgaatcgctctgccgactcaccgggaaaaccggcgtcgagatggaagcattgaccgccgcctcggttgccgcgctgaccatttacgatatgtgcaaagcggtgcagaaggatatggtgattggctcggtgcgcctgctggcgaaaagcggcggcaagtccggcgattttaaggtgggtgaatgccatgattaaggttctgttttttgcccaggtgcgcgagctggtcggtaccgattcgctgacccttgatgccagcgaactggcgactgtcgaagcggttcgtcagcagcttgccgcccgcggcgatcgctgggcgctggccctggaggagggcaagctgctggcggcggttaaccagacgctaacctctttcgaacatccagtggccagcggcgacgaagtggcgttcttcccaccggtaacggggggctgacatgacgcaaacccgtatcgtggtcagcccggcgcgctttagcgtcagtgaggaatatccctggctggcggaacgcgatgaagacggcgcggtggtcaccttcaccggtaaagtgcgtaaccacaacctcggcgacagcgtgaaggcgctgaccctcgagcactatccggggatgactgaaaaatcgctggcggaaattgtcgagctggcgcgcgagcgctggccgctgggccgggtgacggttatccatcgcatcggcgaaatgtggccgggggaagagattgtgtttgtcggcgtcaccagcgctcaccgcggcagcgccttcgccgccggcgagtttattatggattacctgaaaacccgcgcgccgttctggaagcgtgaagcgacgccggatggcgaacgctgggtcgacgcccgcgacagcgatcgccaggcggcagagcgctggtagtgtgatacgcttacagggtgaaactttgtttatcaggagagagtcatggacagatatccgcgttccgattcaatagtgcagggccgtaccggcctgcagacttacatggcgcaggtgtacggctggatgacggtcggcctgctgctgacggcgtttatcgcgtggtttgcagcgaatactccggcggtgatgatgttcgtcttttcgagcaaaatcactttcttcgggctgattattgcccagctggcgctggtgtttgtgctgtcgggaatggtgcagcggctgagcgccgggatggccaccacgctgtttatgctctattcggcgctgaccggactgacgctatcgagcatttttatcgcctatacctattcatcgatcgccagcacctttgtggtcaccggcgggatgtttggggcgatgagcctgtatggttacaccacgaagcgcgatctgagcggcttcggcagcatgctgtttatggggctgattggcatcgtgctggcgtcgctggtcaacctgtggctgaagagcgaggcgctgatgtgggccgtgacctatattggggtggtgctgtttgtcggtctgacggcgtatgacacccagaagctgaaaaacatcggcgagcagattgatacccgcgacagcgccacgctgcgtaaatactcgatcctcggcgccttaacgctgtatctggacttcatcaacctgttcctgatgctgctgcgtattatgggcaaccgccgctaacctctttatatcaaggggttgcatctccgaacgcccggcaagcgcagcgccgccgggcgagatttcaggcacggtacccttgattttgccgggtggcggctgcgccttacccggcctacaggatcctctcacaggcttacgctccgtaggcccgcgcaagcgtagcgccgccgggcgatggcatcagacacggtacccttgattttgccgggtggcggctgcgccttacccggcctacaggctcctctcacaggctcacactccgcaggcccgtgcaagcgcagcgccgccgggcgagatatcaggtacggtacccgtggtattgccgggtggcggctgcgccttacccggcctacaggatcctctcacaggcttacgctccgtaggcccgcgcaagcgtagcgccgccgggcgattgcatcaggcacggtacccttgattttgccgggcggcggcaggcgccttgcccggcctacaggatcctctcacaggcttacactccgtaggcccgcgcaagcgcagcgccgccgggcgagatatcaggcacgatacccgtgatgttgccgggcggcggctggcgccttacccggcctacaggatcctctcacaggcttacaccccgcaggcccgcgcaagcgcagcgcggcctggccgtttcattcgcgggccagcttgcgctggttcttttgccgcagctttttcgcccggctctccagcagcagataggccaccgtcgccagcagtaatggcaggaaataatagagcgcgcgccaggcgagcagggcggcaatgatcgcgcccttcgaaatatcttccccggagagcatggcgataaacaccgcctccagcacgccgatcccagccggaatatggataatcaccccggcgatactgctcaccagcagcacccctaataccagaaaatagttaatctcgctgcccaacagcagccagattatcgcccccatcgccatccagttcgccgccgagagcaccatctgcagcagcgcgaagcgccaggagggcagcaccagccgctggcctttaatcgtcaggtgacggcgtttagcgaacgcgcagccgaacagatagcaaagcgtaaggatcagcatcaccccgccgataatgcgcagagtggtctggctgatgtaccagtgcggcggcagcttcaccagatctgccgtgaatatcaccccgcccagcagaatatagcccaaccagttggtggtaatgcttaaggaaaaaatacgggtgatggtgctgccgttcagccccagccgcgagtacagccggtagcgcataccgatcccgccgacccaggtgctgagtgtcaggttgaaggcgtagcagataaacgacaccagcatgacctggcgtttcgccagtttgtgcccgcaataggcccgaccgagcagatcgtagcagccgtaaatgaggtagctgacgataaccagcgcaatggcgctaaacaaggccagccgatcgtagccgcggatcaccttccacacgtcctgccagtcgactttttgcgcgtagatcaccaacaggacgatgacggcgataaaaaagagcacggtcagcactcttttcgccatccgccagcggggatgtgatttgctcatagttgattatccctggctggagactcgacgcggtcctgagtttcaatttccggctggaccggcgggctgactctggccagccgcggggtatgagccggtagccagccgacccatgccgggaagtggcgcagaaagtggaaagccatcacgctgacgcccagccgccaccagttgcgtttcggcagcatcgttttatcgatccgctggcaatcccgggcgataagcccgttgagattatcgcgcagcgtctggttaaacacccgatcgtggatgatcagattggcttccagattcagcgacaggctaagcggatccaggttgcttgacccaacggtggcccagtggtcgtctgccagagcgaccttgccatgcagcgggcgacggcgatattcgtaaatctgcaccccacccttaacgagatagtgatagagcaggtgggcgccaaacttcacaatgggaatatccggttcgccctgcacgatcagcttaacccgtactccgcgccgcgcggcattgcgcatcgcatgcagcaggcggtagccggggaaaaaataggcgttagcgataatcacttcccggcgggcgctggtcagcatcttcaggtagtggcgttcaatatcgtcgcggtgatcctggttgtcgcgccagacgaacagcgcctgcgcctcgccgggggtctggttaatctccggctggtggcgacgacgtcgccaccagcggcgggcggtttcgctgttgggcaggttttccagctcgaactgcaggatgtcgagcaccaccggcccttcgacctgcaccgcataatcctgcttcgcctccggaccgtagtcgctcatatgttcggcggagtagttaataccgccgacaaaggcggtggtgtcgtcgattaccacgattttacggtgcatgcgacggaacagattggtgcgcatccccatcagcttaggacgcggatcgtagtagcggaaaatcacgcccgcggcggtgagctcgcagacaaattcatcgctgagatccggggaaccatagccgtcgaggagcacctccacctggatgccgcggcgggcagcctcgagcaggaccgcgtgcagccgccggcctacctcatcttcaaaccagataaaggattcgaggatcacccgccggctggcgcgaccgatggccgcaaacagcgccggatagtactggtcgccattctccagtagcgtaatgcggttgccttcctgccaacgacatttcacaaatgtatctccacgctaaggggtgcatgatcggacagatgccgccaatgtttaagggccagcgccttcgggcgactggcgtgggcgttcttgacgtaaatgcggtcgaggcgcaacagcggaaaactgaccggaaaggtgcgcgccggccgtccgcgggcgcgggtaaagatctcttccagcccggcctgggcttttaacggctggttagcctgctgacgccagtcgttaaaatcgccagccaccaccaccggctcgcccgcgggcagggtattgacccactccgccagcatggtcaactgcgcctgccgttggtcggcgcgtagaccgagatggacgcaaatcacgtgaatagttatcccgctccgcggcggcacgatgcggcagtacagcaggccgcgcttctccccgttgccgaccgagatatcgcgattttcgtagtattcaatgggaaagcgcgacagcacggcgttgccgtggtggccttccggataaaccgcattgcgcccgtaggcgtagtcgctccacatggtgtcggcgagaaattcataatgggtcgtatccggccagttttcgatgtgcagcggatgtacctcatgagcgcccatcacctcctgcaggcaaacaatatccgcgctaacgctgcgcacggcgtcgcgcagttcgggcaaaataaaacgccgattaaacgccgtaaagcctttatgggtgttaattgtcagcacgttcaacgaaaatcccgccgttggctcagccataattctccagtaaatgtcactttcctgaataaaatagtgtagtagacgtcacaaaaagatgcggtgttacggaattttccgtaaagtgcggtactctgagtagcagagaaaaatccttcaggagagaagccatgaagtggcaacaacgtgtacgcgtcgcaacgggtcttagttgctggcagattatgttgcatctactggtcgtggcagtactggtgatgggttggatgagcggcgcgctggtgcgcgtcggattgggactgtgcgtcctctacagcgtcacgctgctggcgatgctgtttttacagcgtcaccatgaggcgcgctggcgcgatgtgggagacttccttgaggagctcaccacgacctggtacttcggcgcggccatgatagcgctgtggctgctgtcgcgcgtgctgcacaacaacctgctgctggccctcgccgggctggtgatactggcaggcccggcggtggtctcgctgctggcgaaagataagagccgttaccctaaagcgttcgggctacaacaaggcggcaacgcagcgaatccccagaagcatagataactatgcgactggggtgagtaaggaaagccaacgccgttgtagtttgaacgatgacgggtattacgcaatcttccttcggaacatcgcatacgccgctgagccggtggtggccgctatgaccagtagcggccacaaacttccccacacaatctccagactcgcatccttcagataaatttgcttggtgatatcggtaaagtggcggatgggatttatccaggtcagatcctgcagccactgcggcatgttttccactggtgagacgtaccccgacaggagaatagccggcatcataaagacgaacacgccgataaacgcctgctgctgggtggcgcacagcgacgaaatcaataagccaaagcccaccagcgatagaccgtaaatcaccatggtgaaatagaacagcagcagcgagccggcaaacgggatctgataggcccagataccaatcgccagcacgatagttgcctgcagggtggcgacgatcagcgccggcaccgccttgccgacgaaaatttgccaggtggcgaggggggagaccagcagctggtcaagggtgccctgctcgcgctcgcgagccaccgacagcgaggtgacgatcatcaccccgatggtagtgatcatggcgataagcgacggcaccacgaaccatttatagtcgagattcgggttgtaccagttgcgcaccaccagctcgctgttgttcggcttcgctttaccctccagcagctcctgctgatagtttttcacaatctgttgcagatagttggcggcgatttgcgcgctgttggagttgcgtccgtcgagcagaagctgcagcggggcggttggatagttatccagattgcgcgagaaatcggccgggaagcgcaccaccagcagagctttttgttcatcgatggtcggctggatcgcctgcgggctttgcagcagcaggacgtgggtaaaggctttggcgcgggcaaagcgctgagtgagttccaccgcgtggcgaccgctgtcctcgttgtagatagcgatggtggcgttggtcacctccagcgtcgcggcaaagggaaacagcagcacctgaatcagcaccggcatgattaaaatcgcccgcgtctgcggctcgcgcagcagcgactgcagctctttgcggattaatgtccataaacggtgaaacataatagctcctttggcccattcaaccacgccgggcggcactgcgtttgcccggcctacgggatcggcgaaccgtataatcgatgttggttaaaccgtaggcccggtcggcgcagcgccaccggacaaaacctaatccagacgccgtttggttttcagccacgtcagaccgataaacatcaccgccgacgcaatcaaaaacagcacgttgaccagcagcaccaccggaatattgcccgccagaaacaggctttgcagagtactaacgaaatagcgcgccgggatcacataggtcaccgcgcggatcaccgccggcatactgtctatctggaaaataaacccggacagcataatcgacggtaaaaaggcggcgttcagcgccacctgcgcggcgttaaactggttgcgggtaatggttgagatcagcagccccatccccagggtgctgagcaaaaacagactggtaatgacaaacaggatcggcagcgagccgcgatagggcacgccgagaataaataccgacaccagcatacacaacagcatcgccagcatgccgaggaaatagtagggaatgagcttgcacagcagcagttcggcgcgggtgatctccgtcgacagcagcgcctccatggtgccgcgctcccattcgcgggccaccaccagcgaggtcagtatggcgccgaccacggtcatgatgatggtgatcgccccggggataataaagtgctggctaatagccgccgggttaaaccagtagcgcatctgcacgtcgatcagcggttcaaaggtttcgccgcggtcttccgcccgctgctgctgccagatttgccaaataccttccacatagccctgagcgaagttggcggtattgggctcgctgccgtcggtgatgagctgcagcggtgcgtcggcgccggggcgggccatctggcggtcgaaatccaccggaatgaccaccatggcgcggatgcgcccggcctgcatcatctcaatcagctgcctgcggctgtcgctgacggtggcatcgatatagggcgagccggtcatggtatggacgaaatccagcgcctcttcgctctgctgctcaagcaatacgccgacccgcagcctgctggagtcgaggttaatgccgtagccgaagataaacagcagcagcagggggatcaccaccgcgatcagccaactgctgggatcgcgcacaatctgccgggtctctttgacgcacagggcgcggacccgccgccaggagagaatgctattgcccatggctattctccttgtcccagcggttaatcagggtaataaacgcctgctccatggtcgggtccgtctggctgtcgtccgccgcctgggccttcagcgcgtccggggtcccgctggcgataagcttgccgtgatagaccagcccgatgcggtcgcagtattccgcctcatccatgaagtgggtggtgaccattaccgtcacgcctttatcaaccatgctattgatatgtagccagaactcgcggcgggtaaggggatcgacgccggaggtgggttcatcgagaaacagaatatcgggttcatgcatcagggagcaggccagcgccagccgctgcttgtagccgagcggcagctcgtcggcggcgtggcgggcgatacttttcaggccaaaggcatcgctcatccgggcgattttttcattttgcgccctgccgcgcaggccatagacgccggagaaaaagcgcaggttttgctcgacgctgaggttgccgtacagcgaaaatttttgcgccatatagcccagatgctggcgcgccttgccagagctgaccttgagatccattcccagcaccagcgctttgccggaggtgggcaccagcaggccgcacatcattttgaaggtggtggatttcccggcgccgttggggccgagcaggccgaaaatttcaccgcgcttaacctggaaatcgacatggtcggtagcggcgaaatcaccaaactttttcgttaacgactgggcttcaatgaccgtttcctctttgctgccgtcaacgcgatggataatcgcccccaacggcgattcagcggtcccggcgccgccgagcaggtcgataaacgcatcttcaaagcgcggcgcggtgtcggccacctgcagcggcggcatgtcgccatgctgctggacttcctcaatgcgcgcgtcctttttcaggatcagacgcaccgatttgccctggatcaccccgtcgctaacctgcggcagcttcagcgcccgctgcagcaggcggcggttgttctcctgcgggctggaaaccagaaagctgcgcccggccatggtttgcgtcagcgccgtcggctcaccctggtagagcagtttgccttcgttcatcagcagcacatcgcgacactgctcggcttcatcgagataggaggtgctccacaggatcagcatgccgtcgccggccagctcgtgcaccatctgccatagctcgcggcgcgagatagggtcgacgccgacgccgggctcatcgagcagcagtactttcggatcgcccaccagggtacaggcgaggcccagcttttgcttcatcccgccggaaagcttgcctgccagccgttcggtgaatggaccaagggaggtgaactccagcaggcggtcgaaaattttcttccgcgcctcgccggtgacgctgcgcaggtcggcgtacagggtcaggttttccatcaccgtcagatcttcatacaggccgaacttctgcggcatatagccgagcaccgcgtgcagggcgctgtcgtcttttagcgggtcgaagcctatcacgctggcgcgaccctcatcaggcttgagcaatccggcgagcattcgcatcagggtggttttccccgcgccgtcgggtcccaccagcccggtgacgtagccggcgcggatcgtgcaggtgagcggcgctaccgctggcctgtccataccgggaaaacggcggctcaggccgtttaaggcgatgacggtctcactcatgtccgttcccgtggctaaaggagatggtcaccggcattccctggcgcagcgcgccgtcggcatcagtcaccacaatgcgcagacggtagaccagatcggtgcgcagatccggggtctcgacggtcttcggcgtgaattcagcgctcggcgagacaaaaccgattttgccgtgatagggcttatccggccggctgtcggtatagagcagcacttcttgtcccggctgcgcctggccgaggtttttctcgtcaacataggcgcggacccacaccggatgcgttaacgacagcgtcagtacggtaccgccggcgttgagcatagtgccgggctcgacggcgcgggtcatcagcgtaccgtcagaaggggcggtgagcacggtatcgtgcaggtccagtttggcctgggccagcgccgcctgcgcctgttccagactggctttggcctgggcaatctcctgcgggcggttaccggcgcgatactgacgcagcttatcctgcgccgatttgagcgttgcctgcgcctgatcgcgcgaggagcgggcattctccagatcgttggcggaaatggcgctgctggcgcgcagcccgagctggcgctgataaaagttttgcgcatagtcgtaagcggcctgcgcctgtttcaccgccgccgcggcctgggcaatctcttccgcgcggtagccggccatcatcaggtcatactgcgcctgggcggtggatacattggcctgggcctgcagcagggcattttcatacggcgcgcggtcaagctcgccgagagtttgcccggcgcggatgctgtcgccttcgtcgacggtcagcgaggccagcctaccgccaacgcggaagctcatgttgacggtgcggatatcgacattgccatacagggtcagcggctgctgccggctgctctggtaccaccaccagccgccgcccagcgcggcgagaagaatcacgatcagcagaatgacgacgacgggttttttcatcagcccaaactcctttgcgataacccatgcaggatgaaatcgatatgacaggtaatgacttcgaaaatctgttccgttttttgcgcgtcaaactgcgtccagccggtgcgcagcaggatagtttcacgcccgagacggaaagcgagcacctcgcccagcagggcgtgggtatggaggatcatttgcgtatcactggcttcgcagccggtccaggcggcaatcagccgggtgagataatggtgcaagggggcaatcacctgctggtggatcagatggtaggcggcggtcggcgccagctgctcacgggaaatgaatttgcttaagttaaccgtgtcgtcctgggtgagcagcaggatcatgttgtggcaggcgctaaggatgaggtcgcggatcgcctggcgatccggcgcttccccggcaagcaggtgctccgccgcttcggcctgcgggcgaaaattgtcgccgataaaatcggcgatccactgggcgcaggcaagatacagatcgtctttcgagccaaaataataggtgatagcggcgatattctgcccggcctgggcggcgatatcgcgggtggtggcgtgctggccgtactcgccaaactgggcgatagcggccgcgataagctgattttttgcctgttcgcctttactggtcatcgcgctcggtaaaagttaaacaatcgattgattaactttaggcgccgactggcggtttgtccaccagccgggatcaaatatggaacccttcctctttcagctctccggcgacccaggcgaagaagcgctggaccttctccttctgttcattagcgtgggggaggacgaagtggtgcgcgccgaccggcatgctccgctcgtcggcaaataccggcgtcagctgcccctggcgcacgtgtccgccggccagcagattgctctcgaggatcacgcccatccccattctggccgcctcgatgctcatatatgaccggtcgaaattaaaaatgaagtttttatgccagccgcggaccttgtgccacgacagccagttgctccagttaatcaaggtgctgtcggagtggatcagatcgcaggccagcagatcttccacagcctgcacaggatggctggctaaataagacgctgcgctgtagggcaggacgcgctcatttttaatggttctgaccagcagcgtcggccactgtgacagcccgtgacgaatatcgatatcaatattatcccgggagaactggatgctttcgtatgaacaggtcaggctgatttttaacgccggccacgcctggcggaatttatccagacggggcatcagccatagcaggccgaagctcggcgccgaatgaatgcgtaaataatcctgatggatatcgttgatcacctggctggtggcctggccaatcatattcagcgccccggagacctctttgagatatttttctcccaccgccgttaacgtgacgcctttgctgctgcgggagaacagttttttccccagaaagtgctccaggctggctatctgatggctgaccgccgaggcggtaatattgagattctctgcggccagattaaggctgccggtagcggcgacttcaataaaagcctggatattgcgtaaagagggcatcggcagatttttattgggtagcggttggctcatggcggcatcctgcgcggggcgcgaataaaagaaaatagcgaacagcgtggcgcagccgggatgtacagcatagggaaaagcgaaaaaacaacgttaatttgtgatgggcttaacaatttatcttgttaaaagcgcgcaggtcagaaaacgctaaaaatttgcgggaagtcactaactcaatttttctcaatcataattgaggttttttgaataccgtttcattttggggttgttatattcctctcacaggcctgataacaatctgcgatgctcttgcatcgcaattataaaacacctaaccacctgtttcgctggcgaaaagcatttatctcttgctcctgtatggatagtaaaacgcggtgatccgaagcggcagcttacagcgaagtggatgaggtataaaacgaggaaaccctatgtcacgtatagatacgctggtctgtactgacgccaggaaaacgaaatatcgtttcgtggttttgacgatgatttttctggtgtatgccatcaattacgccgaccgaacgaatattggcgcggtactgcctttcatcattgatgagtttcatatcaataattttgaagccggggccatcgccagtatgtttttcctcggctatgcggtaagccagatcccggccggctttttcatcgccaaacgcggtacccgggggctggtatcgctctccattttcggcttctccgcctttacctggctgatgggcacggtgagctccgtgtttggcctgaagctggtgcggctgggactggggctgagcgaagggccttgcccggtggggctggcttccaccataaataactggtttccaccaaaggagaaagccacggcaaccggcgtttacatcgcggcgaccatgtttgcgccgattattgtgccgccgctggcggtgtggattgcggtgacctggggctggcggtgggtctttttctccttcgcgatacccggaattgtggcggccatcgcgtggtatctgctggtcaaatccaagcctgctgagagcggatttgtttcccaaagcgaactggcagagattaatgccgggcgtgaaagtcataataatagcgtacgcgaaaatatcttaattgccgaaagattcacctggctggataaaatcattcgggtaaagaaaatggcgccaattgatacggcgaaaggcttattcacctcaaaaaatattctcggtgactgcctggcgtattttatgatggttagcgtgctgtacggattattaacctggatccccctgtatttagtcaaagagcgcggtttcgatgtaatgagtatgggcttcgtggccagtatgccgtgcatcggcggctttattggcgcgatcggcggcggatgggtttcggataagctattaggccgccggcgtaaacccaccatgatgttcactgccgtgtcaacggtggtcatgatgctaattatgctgaatatcccggccagcaccctggcagtttgtattggattattctttgtcggcttttgtttaaatatcggctggccagcctttaccgcgtacggtatggccgtttcggatagcaaaacctatccaatcgcctcttccataattaatagcggcggcaacctcggtggatttgtcgcgccgatggcggctggtttcttgcttgataaaaccgggagttttaattctgtatttacctattttggtatctgcgccgccattggtttggtggtgattcttttcctcgatgaaccacaataacggaaatatatcctgttaattaatatgacgtaatgtcatggagtgaaactatgttattaaaagataaagtcgccattattactggcgcggcctccgcacgcggtttgggcttcgcgactgcgaaattattcgccgaaaacggcgcgaaagtggtcattatcgacctcaatggcgaagccagtaaaaccgccgcggcggcattaggcgaaggccatctcggcctggcggccaacgtcgctgatgaagtgcaggtgcaggcggccatcgaacagatcctggcgaaatacggtcgggttgatgtactggtcaataacgccgggattacccagccgctgaagctgatggatatcaagcgcgccaactatgacgcggtgcttgatgttagcctgcgcggtacgctgctgatgtcgcaggcggttatccccaccatgcgggcgcaaaaatccggcagcatcgtctgcatctcgtccgtctccgcccagcgcggcggcggtatctttggcggaccgcactacagcgcggcaaaagccggggtgctgggtcttgcgcgggcgatggcgcgcgagcttggcccggataacgtccgcgttaactgcatcaccccggggctgattcagaccgacattaccgccggcaagctgactgatgacatgacggccaacattcttgccggcattccgatgaaccgccttggcgacgcgatagacatcgcgcgcgccgcgctgttcctcggcagcgatctttcctcctactccaccggcatcaccctggacgttaacggcggcatgttaattcactaagcgaggcaaacagatgaagatgaccgaatcacaaaaagtcgccgcggcggcgtggcgtattcgccgttacgccctgcaaatgggggaagtgcaggggcagggctatatcggccaggcgctgggctatgccgatgtgctcgccaccgccttcagccatgccatgacctatcgcccggaagatcccgagtgggaggggcgcgatcgcttcctgctctctcatggccattacgctatcgcttattatgccgcgctgctggaggcgggcattatcccggaagccgaactggaaacctacggctccgacgacagccgcctgccgatgtccggcatggcgacctacaccccggggatggagatgtccggcggctcgctggggcaggggctgtctatcgccgtcggcatggcgctcgggctgcggcagaaacagagtaaggcctgggtctacaactccatgtccgatggggagctggacgaagggtcgacctgggaggcggcgatgtcggcggctcactatggcctgagcaacctgattaaccttgtcgatgtcaacaaacagcaggctgacggcgattcacgcaaaatcctcggctttgagccgctgcaggataaatgggccgccttcggctggtacgtacagcgcgtggacggtaacgatctgccggcggtgatggccgcctttgacaacgcgaaaagttattccggcaatcagccgcgggtcattttatgcgacacgctgatgggcaaaggggtgccgttcctcgaaacccgcgataaaaaccattttattcgcgtcgatgccgacgaatggcaaaaagcgatcgcggtgctggacgctaacaaaccggaaggagtgctgtaatgagccagagtcaaccccgtttaaaaacgtcggcgatgatcgcctcgattgctgatgaaggccaggcgaccgtccctgcgcccttcggcgtcgcgctgtcaaaactggcggcgcagcgcccggaaatcgtcggcatgaccgcggacctgtcaaaatataccgacctgcatattttcgcccaggccttcccggatcgctttttccagatgggcatggccgaacagctgctgatggcggcggcagggggatggcgaaggagggatttattcctttcgccaccacctatgccgcctttgcaacccgtcgcgcctatgattttattcaccaggtcatcgccgaagagcatctgaacgtgaagatctgcgcggcgctgccgggcctgacgaccggctatggccccagccatcaggccaccgaagatctggcgatcatgcgcggtatccccgggatggttatcgtcgatccttgcgatgcgctggagatagagcaggcggtaccggccattgccgatcaccaggggccggtgtatatgcgtctgctgcgcggtaaggtgccgctggtgctggataaatatgactatcagttcgaactgggtaaggcgaagctgctggaggacggcaacgatgtgctgattatctcctccgggctgatgaccatgcgcgcgctggaggcggctgaaaagctgcgggccgataatatcggcgtggcggttctgcacgtgccgaccatcaaaccgctggatgagaaagcgattattgaacaggcgtcgaagccgggccgcctggtggtaactgcggagaaccacaccgcggtcggcggcctgggggaagcggtggccgcgctgctgatgcgtaagggcgtacgctgtgagctggatagcgtggggctgcccgacgcgttcctgttagccggcgccctgccgaccctccacgatcgctacggcatctccaccgcgaagattgtcgaaaaaattaagtatcgtctgcgttaaccgcgctgctatgacccactggccgctgagcgcgctcggcggccttctcatgcccgccagccaggcgcggcattcttttgcagattttatgcggcctgtcacaaaatctgctagactgcgccccttcatggcattgtggtttttgccatctcttatcgcaataatctccctgaaaactacgcccttcaccgggccggggcggttcggagttgttatgtcttttgattcccttggcctgaatcccgatatcctgcgcgctgtcgctgagcagggctacgttgagccgacccctatccagcagcaggcgatcccggcggtactgcagggccttgacctgatggctagcgcccagaccggcaccggtaaaacggcgggctttaccctgccgctgctgcagcgcctgatccagaatgagccgcacgcaaagggccgtcgtccggtgcgcgcgctgatcctgaccccgacccgtgagctggcggcgcaggtgggcgagaacgtccgcgattacagtaaatacctgaatattcgctcgctggtggtcttcggcggcgtgagtatcaacccgcagatgatgaagctgcgcggcggcgtcgacatcctcgtcgccaccccgggccgtctgctggacctcgaacatcagaacgccgtcagtcttgataaagttgaaatcctcgtgctggacgaagcggaccgtatgctggatatgggctttattcatgacatccgtcgcgtactggccaaactgccggcgcgtcgacagaacctgctgttctcggcgaccttctccgacgagatcaagggcctggccgagaaactgctgcacaacccgctggaagtggaagtggcgcgtcgtaacaccgcgtccgagcagatcacccagcacgtccattttgttgacaagaaccgcaagcgtgaactgctgtcgcagcttatcggcgaaggcaactggcagcaggtgctggtgtttacccgtaccaagcatggcgccaaccacctcgcggaacagctcaacaaagacggcatccgcagcgcggcgatccatggcaacaagagccagggagcgcgtacccgcgcgctggccgactttaaatccggcggcattcgcgtgctggtggcgaccgatatcgccgcccgcggtctggatatcgaagagctgccgcacgtggtgaactacgagctgccgaacgtaccggaagattacgtccaccgtatcggccgtaccggtcgcgcggcggccaccggcgaagccttatcattggtgtgcgtggatgagcataagctgctgcgcgatatcgagcgcctgctgaaaaaagagatcccgcgcatcgcgattgccggctatgagccggatccgtccattaaagccgaacctatccagaacggtcgccagcagcgcggcggcggtcgtgggcaaggtcagggacgcggcggccagggtcagggacgcagcggacagccgcgcagccagaataatgccccgcgccgtcaggacggcgaggcgccgaaagcgcgcactcaggacggcaaaccgccgcgccgccgtcgcccgcgtaaaccggctggcgaataacacgctgatgtccgggccgcgataacgcgccccggctcaggcccgtctgtccgctacgcggcggcgggcctttttctttccattacactatttgtcgagcaggcttccacactccgcagaaagcaatacctccgggcgggcaaaaatggcacaatagtggctgtttatacagtattcaggttttctcatggctttgaccgctgcgctgaaagcgcaaatcgccgcctggtataaggcgcttcaggaacagatcccggactttattccgcgtcccccgcagcggcagatgatcgccgatgtggcgaaaacccttgccggggaagagggcaggcatctggctatcgaagcgccgaccggtgtcggcaaaacgctgtcatatctgatcccgggcatcgccatcgcccgcgaggaacaaaaaacgctggtggtcagcaccgccaacgtcgccctgcaggatcaaatctacagtaaggacctgccgctgctgcgtaaaatcattcccgacctgcgcttcaccgccgcctttggccgcggacgctacgtctgtccgcgcaacctgacggcgctggccagcaccgagccgtcgcagcaggatctgctggcctttctcgatgacgatctcaccccgaataatcaggcggagcagaagctgtgcgcgaccctgaagcaggatctcgacagctaccgctgggacggcctgcgcgaccataccgacaaagccatcgacgatgggctatggagccggctgagcaccgataaggccagctgcctgaaccgcaactgccactactatcgcgagtgcccgttctttgtggcgcggcgggaaattcaggaggcggaagtggtggtggccaaccatgcgctggtgatggcggcgatggagagcgaagcggtgctgccggagccgaaaaacctgctgctggtcctcgatgaaggccatcatctgccggacgtcgcccgcgacgcgctggagatgagcgccgagatcaccgccccctggtttcgcctgcagctggatctgttctgcaagctggtggccacctgcatggagcagtttcgtccgaaaaccacgccgccgctggccaatccggagcggctcaccgctcattgcgaagagcttttcgagctgattgcctcgttgaataatattctcaatctctatatgcccgccggtcaggaagcggagcatcgcttcccgatgggcgaactgccgcaggaggtgatggagatctgccagcggctggcgaagctcaccgagttgctgcgcggcctggcggagctgttcctgaacgatctcagcgaaaagaccggcagccatgacgtggtgcgcctgcatcgggtgctgctgcagatgaaccgcgcccttggcatgtttgaaagccaaagcaagctgtggcgcctggcgtcgctggcgcagtcctcaggcgcgccggtaaccaaatgggcgacgcgggtggtgcgcgatggccagatccacgtctggttccactgcgtcgggatccgcgtcagcgatcagcttgaacggctgctgtggcgcagcgtgccgcatatcgtggtgacgtcagcgacgctgcgctcgctaaacagcttctcgcgcctgcaggagatgagcggtctgaaggagaaagcgggggaccgcttcgtggcgctggattcgccgttcaaccacgtggagcaggggaaaattattattcctcaaatgcgttatgaaccgctgatggataacgaagagcagcacattgccgagatggcggcctattttcgccagcaggtggagagcaaaaaacatctcgggatgctggtgctgtttgccagcgggcgggcgatgaaccgcttcctcgagcatgtgaccgatctgcgcctgatgctgttggtgcagggcgaccagccgcgctaccggctggtggagctgcatcgcaaacgggtggaaagcggcgagcgcagcgtgctggtgggtctgcagtcctttgccgaaggtctcgatttaaaaggcgatctgctaagccaggtgcatatccataaaatcgcttttccgcccatcgacagcccggtagtgatcaccgaaggcgaatggctgaaaagcctcaatcgttatcccttcgaggtacagagtttgcccagcgcctcctttaatcttattcagcaggtggggcgtttgatccgtagccataactgctggggagaggtggtgatttacgataagcgtctgttgaccaaaaactacggcgcgcgtctactgaacgcgttacctgtttttcccatagagcagccgggcgttccggaggttatagtaaaacggaaagcaaaacagacagcaaaacagacgggccgcaaacgtcgctgacgccggcgcgtgatgcaccagggggagccatggagtacagcaaaattataaaagaggtgggtcgcggtaagaatcatgcccgcgatctcgatgaagagaccgcccgtgcgctctacgcgcggatgctgaacggcgaggtgccggagctggagctgggggaatattaatcgccctgcgcattaaaggcgaaggcgaagcggagatgaaaggtttttacgccgcgatgcagcagcatacgctgcgcctgaccccgccggccggcaagccgatgccgatcgttatccccagctacaacggcgcgcgcaagcaggcgaacctcacgccgctgctggcgatgctcctgcacaagctgggatttccggtggtggttcacggcgtcagtcacgatcccacccgggtgctgaccgaaaccatttttaccctgctggacattccggccaccctgcacgccggacaggctcaggcgcagctggagggccatgaaccggtgtatatcccggtgggggccttctgtccgccgctggagaaacagctggcgatgcgctggcggatgggcgtacgcaacagcgcccataccctggccaagctggccacgccgtttggcgaaggggaggcattgcgtctctccagcgtgtcgcatccggaatatgttccccgggtggcgaacttctttcgcgagaccggtggccgcgcgctgctgatgcatggtaccgagggcgaagtgtacgccaacccgcagcgctgtccgcagatcagcctgattgatgagcagggcgtgcgggtgctgtacgaacgccagactgagatggcagcggaggcggtggtcctgccgacctcgaaagaccctgaggtcaccgcgcgctggattgaacgctgcgtcgctggcgtcgaaccggtgcccacctcgttgaagatccagcttgcctgctgtctgctggcctgcggggaagtcacctcgctggagcagggcctcagccgcgtcaacgactgttggtgatcggatctgcaggataaaaaaagcccgtccggtggctcggacgggcaaggcaagggtattaaaggtcttttcagggttaattcagtggcttacagatgggtgcagcgattatttatagataaccgcagtaccgctcagtttgttgttggtgttagcggaagtaatgctgtagccggtcgcgccagcggcttcggctttagcagccagttttgcttccagaccatctaaagtggttgcgccttgcgcagacaccacgccgatcttattcatgctttcagcctgagcgggggtaaccggttcggcggcaaaggcgccgaaggaaagagcggtcagagcgatggcagcggcagcatatttgatgtttttcatagttaatctctcgcaggttgttctgttcaggggacgatgttccgtcgatgtgataagtatcacgcttttctgcgagagataaaatcgaaggaaattcacagtcttcatcgaattttttgaatgattaataatttactgattattaataaattatttctcattcttttcgtcacgaagcgtagcgaggaacaccgacgcgtttaagggcacatattgcgactttttccgccaaaaaatgtgcgcgaaaagataatgcgaaaggctgtcataaacggtaaaggaaagtcagcgtagctggctatccttggaaccgcgacgattatatcctgaaaatgtattgttatgtaaatctttctcctgctggcacttcacgcagtatctgacccctgggatggcctgtcgacgggcctccggaatcggctctccgcattcatcacaaaatttgttgctttcgccgcgcggaagctcgcggcgggcgcgagccaccgcatcgtcaatagtgctgtcgatctgatcctgtacggcgccgtcgcctgcccaacctgatgccatcgtctgcctcctgtaaaaggttattgataaattatagctgaaccgtacagccggttaccgctgctggcggcattgatccgccaggctatcgccccctgacggtgggccttatccgcgagggcggccgccaggtcgtccagggtgctggcgccgaaggcggagacggtgccgacagggcggagcggcccgttatagggcagtacgggtggcggtggcaggggagaggccgcggtggcatgagcggtgagcgccgcggcgaacagcagcgagacgaatttcatcagcatatcctcataaaccgcatgggacatagcttaagtgtaggtctttccagaccgcgcgacagggaatgtttaatgcaaaacagtgcgttttgcatgctaccggcgcaggggagcgctactctggccggtagattatttagcgggcgtcagggcggatcatgtcaaagcgcaggctgtcatcaataccgtaataggcgctcgggccaccggcgcgcaggatcggctgggcccgggcggtttgatagataccgttgtccagcagtgattcatcgatatgcacggcgaccacttcgccgagcaccagccacgtatcgacagggttgccgtcggcggtggtgagttgaatacactgcgacagacggcactcaaagttcaccggactctccgcgacccgtggagcgctgaccaggcggctggcggcggcggtgaggccggcgcgcacgaattcgtcctcatggtgcggaatcgaggctgacgtttcattcatcgccatggccagcggtcgcgtcgccaggttccagacaaactcctttgtttcgacgatatttcgcacgctgtctttccagccgctgctggcgaaaccaatgatcggcggccgatagttaaagcagttaaaaaagctgtatggcgccagattacgctggccctcggcgtcctgcgaggcgatccagcctatcgggcgaggcccgattatcgcgttcagcgggtcatgcggcaggccgtggccctgcgaaggttgataaaagtacatgctgcacctgtcacggataatggagatatccagactcccttatttaccgcgccgccgtcaacgggtatcttacgcggctgttcaaaggagattgtcatgaaagcccagaaaccggggttacacccgcgtaaccgccaccatcaacgctacgacctgcccgcgctctgccaggcccatcctgacctgcagggctacattacgctcaatccgctgggtgagcagaccattgattttgccaatccgcaggcggtgaaggcgttgaataaagcgctgctggcgcatttctacgcggtcaaacactgggacattcctgacggctttctctgtccgccggtgcctgggcgggccgactatattcatcatctggcggatctgctggccggggatagcggcgaggtgccgaaggatgccacgatccttgatattggcaccggcgccaacctcatctatcccctgatcggcgctcacgagtatggctggcgctttaccggcagtgaaatcaacccgcaggcgttcgccagcgcgcaggcgattatcaatggcaacccgggcttgacccggcagatccgcctgcgccggcaaaaagagagccaggctatctttcacggcgtgatccataaaaacgagacctacgacgccacgctgtgtaatccgccgttccatgactccgcagagagcgcccgggcggggggcgagcgcaagcgccgcaacctcggactcggcgccgaaagtggcctcaattttggcggtcaacagcaggagctgtggtgcgaagggggcgaagtagcctttatctcgcagatgatccgcgaaagccaggccttcgcccgccaggtgaaatggtttacctcgctggtgtcgcgcggcgataatctgccgccgctctaccgcctgctgaccgaggtcggcgcagtgaaagtggtgaaaaaggagatggcccaggggcaaaagcaaagtcgctttatcgcctggagctttatggacgacgccaaacgccgtcgtccattctaacgctactcggcggccgggctgtcggcgcccggcatcggcagctgctgccaggtctgtaccggcgcgcgaaccccggcgcgatcgaagtgctttttcacctgggtgtcgagggcaaaacgcaccgtccactgcttcagcggcagggtagtgaagctgacgcgtagcgtaaaggcggtattgctcagccccaccagcccggcgaacgacggttcgccaatgatcagaccgcggatctcctcctgggccagcagatcgtccaccgccgccttcagcgcctggctggctttatccagatcctcatggcggtcaacgtcatagttagccacaaccgagccaatgccacgcacgaagttggcaaaggtggtgatcgaggaccagggaataatgtgataggcgccggtatcctgacgtacccccacggagcgaatcgacattcgttccacggtgccggtcaaagggccgatggtgaccaggtcgccggtgttcatcccgttctcaaactggataaatatgccagtgataatgtctttgaccagggtttgcgcaccaaacgaaatggccagccctaacgccccggcgcccgccagcagcggcgcaatgtttaccccaatttccgagagcaggatcatcaccgtgatggtgctgatcaccaccgccagcgcgttgcgaaacagcgtcagcagcgtccgggcccgcgcgctgggcagcggacggccatgaatatccgatgccagccggttttcaatcaggctggccagaaccgtccagccaatggcggagaagaagaggatcagggcgatgcggatcagcacatccaccgttttttgcccggcatcgttgtgcagccattcccggaagtcaaacaggccccaggcgctcaacagcagcatgatggcgacacagacggtgagaatgcgcgccgccttcagcgaggcggagatccagccatttagacgcttttgcagttcagggtagttgcgctgagtggcgggcgacagggtgatggttttggctatccagcgcgacaggatgccagataccagcgccgcgccgccgataatcgccaggctttgcagggtggcgcccatcatgaatttcaggctgttgcccgggtcgaacagggaaaagaaaaaaagcaccacaaagtaggcgcaggccagccagtgccagaccagcgcgaaggcgcggataaacaggctaaagaaagcgagtgagtggtcggccaggtggatcaacccttgagtaatcaccgctttgttatgaaaaatcaggtacagcgcccacagcgtaatgcacagcatgatgacgacgttagccagcgcgccaacctgaacattcacctgattggaaataatcggcaccgcgacgatcagaccgtaaccaatcaggctgctgagcgcgctcaggcgcaggctccagtatgacgcggcctcgtcgctgaggttaaagggccgcagggcaggaatgcgcgggcagaaaatgagccgcagaatagctttaaaaaactcgatcagcgcgaaggcgttgaggaaaaggctctgctggaaggcgatggtagggttattcccattcaggcgatcgcttagcagctgaccgacaaacagggttagcgccagcagcagcaggtcgatgataaacgccccggcgatggtcaggggcagctggagccagttaccgcgatcgcggtttttatgccgtccccattcgcccattttgcgatacagcggcagcgccgcgaggcgtaccagccaccagaaggcaaacaccagcccggccagcagtaaaaaatgccaggccgcgctggtaaaggtttgcggattaaagggcttatgcggtgagccggtgatattgcgccacagctgggaaaagcgtgatgagagctgttcgccatattcccggcttatctgggtgacgttctccagtaccgtggtctcttctttcaccgccggtggcgtcagcgtcggggtgctgtcgggcggcggcgtggcggctgctttacgcagctggtcaatgagctcctgacgggcggagtcgttggccagcacatcggccagtgcggcataagccgctcttttctgttccacatcgggttcgctggcgctgtttttatcagtgttagccgtcggcacgccggggagggtggcggcggaaagcggggcagtaaacagtgcagcgagcaaaagcaggatccacggcatgggcacctccgttgcaacgtaaacgggtaagtatagaagccgctggcggaaggggagggaagaggattctggaaaagcggctctcatcgtgggggagagagccgttgcgggtcaggcgacgtgttgcaggaattcacgcaggcgcgggctgggcgggttcttcaccagctcctggggattgccgtcttcagcaattcgtcctttgtcgatgaagattagtcgcgaggccactttttcggcaaagccgatttcgtgggtcacaatcaccatcgtcatgccctcttccgccaggtcctgcatcaccttgagcacttcatggcgcagctccgggtcgagcgcggaggtcggttcatcaaacagcatcatcttcggcttcaccgccagcgcgcgggcgatggccacacgctgttgctggccgccggagagttcggacggatagtgatgcgcgcgctcagccagaccgactttcgccagcagctctttcgcctgcttctctgccgcctgcttgctggcgccgcgtacccgcagcgggccaaacatcacgttttccagcgccgtgaggtgcgggaacagataaaactgctggaaaaccatcccggcttcctgacgaatcagacgttcgtccaccttcgggtcgttgaccttcagaccatcgacaatcagatcgccgctggtgatctcttccagcttattgatgcagcgcagcatcgttgatttaccggaaccggaagggccgataatgaccaccacttcaccctgattaattttcagagagatatcgtgtagcacctgggtcggaccaaagtgcttggagacgtttttaaattcaatcacaggattttcatccttctttcaagacgacgcagaataaagctcaggaccagggtgataatcaggtagatcacggctacagcgctccagatttccagcgcgcggaagttgcccgcgatgatctcctgtccctgacgggtcagttcggcgacgccgatgacgatgaacagcgaggtatccttgatgctgatgatccactggttgcccagcggcggcagcatgcggcgcagcgccagcggcaggatcacgtggcgaatggtttcgcgacgcgacaggccaagcgccaggcccgcttcgcggaatcctttatgtatggagagcaccgcgccgcgggtgatttccgcgatataggcgcccgagtttatcatgatggtcactaccgccgcggagaaggggtcgatgcgcagatcgctaaaggccatcggcagcgcaaagtagatgaacataacctgcaccacaatcggggtgccgcgaatgatttcaataaagaccagcgcgatgtggttggcgatccagccgccgaagcagcgggcgaaaccggccaccagaccaattatcagaccgccggccaggccgaggacggaaatccacagcgtcattttggcgccttccagcaaaatcggaatggcaggccagatggcactccagtcaaactgcataatacgttcctgttaccgtgtcgagagcagaggaaagcctccgccaaaataccgtctcccgccgagcctgtgccggaagaccgttgtggtgtcgccggacctcggtccggcgaagtacgtttttattatttgggttcagtgccgaaccattttttataaatttcgttataggtaccattgtcgcgcagcgttttcagcgcaccgttcactttctcacgcagctcgtcgctgcctttcgggaaggcgataccgtagttttgcgcttccagtgattcgcctaccgctttgaacttaccgttgcccgcggttttgatgaagtacagaatattcggcgtatcgtgcagcacggcatccgcgcgaccggttcccagctccatataggcgttatcgatgttcgggaactgacgcagatctttggttttgatattggctttcgcgtagtcaacggagccggtgccgctcttcaccgcgaccactttaccgttcagatctttgacatctttgatgtcgttattattggcgttgaccatcaccagcaggccgcttttgtagtagccgtcggagaagtcgatcgcttttttacgctcgtcggtaatggtgatccccgccagcgccagatcgatatttttggtttgcagcgccgggataatgccgctgaagtccattggcttcagggtgtagtcgagcttcagctctttggcgatagccgcccacaggtcaacgtcaaaacccacatacttatcgccttgcttaaattcgaacgggacgaacgccgtatcggtggcgacaaccagggtcttattggcggcatgggaagaaaccgcaaaagccagggtcagtgcagccagtgaaactttaaatacagacttcatagcatttccttttatatccacgggacgatcccctgcgagaacgactagcctaatgaaaaaatcgtgccacttttacaagctgttgtttttcaacaaacgaagcgtaagtcgttgcacaagatcgatcatttcaggcagtgactgcaccatgatggggcgtcattttggtgcgtcataagggtgctgaattaccagcccatttttagcgcaaaccctgatgggaaaacaatctcgacgtaacgattgtgtgaggtgattattacaatctttttacttttgcgcgcattttcatcaatctggtgccctgaaacggtgcaaggccagtggaggatgaaaagcaaaggatggaatatagggcagggagaaacgctgaggcgccgccgaccgcgctgggccggcggcaaagccttactcgatgttggcttcaatgaaccacaggaatttatccagatcgcgggaagccgcggtgaagatatctgcagtgtcttcgtcttttgcttcgtcgatcgccttacgcacatcgttcgccactaccgcgtagcggtcagccagggctttcaggtgatcctgaacgtgatggatgtccagcgggtagctctgcagcggggttttgctgttaatgacctgagtggtacccagggcgacgccgcccagctgcaccgcgcgctcggccatggtgtccagatgttcggtcagcgcggtacgaaagccatccagcatttcgtgcacggcgataaagttcgcaccgcgcatattccagtgtgcctgcttggtgataagtgacaggtcaatgaactggatcacctggcgattcaacagctcaatggtcgctttcttttcgctgtcagcgacatcgttgcgggtatagaccagattagacgcttttgatttaaccagttttgcggtactcatcgtttcatatcctcttgatattgatgctcatcacacttcagatctgaatgatgtggagcgttgtcccaaatgacttcggaaataagtatagcaagggttttcaagagtgaggcatcggcaggctatatcactccgatagcgcaaagtggttggttattttaaaaatatttaaatatcagctatttatatttggctgaacggcccggatttctctcgggccggcgccgtaacagaatgttaattgatatcgacctgctcgactttactctgccgttgcatagtcagcgtggcgcccatcgaggcgataatgatcgcgccgagcgccagggtctgggagagcttcagcgtttcaccgaggaagatcataccggagagggcagctaacgctggctcaaggctcatcagcgtgccgaaggtgcgcgtcggcaagcgcgtcagggccatcatctcgagggagtagggcagcgcggtagagagaatcgcgatccccaaacccagcggcagcagcgaccactgccacagcgtatcggtggcctgtgccatgcctaacggcacaaacaccagcgaggcgatgagcgaccccatcgctaccgtggctggaccatgctcttcaccggcacgctgtccggtcagaatatagaccgcccagcacgccccggcgccgagggcgaacagcgcgccggttaaatcgacctgcgccacgttctgccccagcggcagaagataccatagtccgaggatcgccagcgccacccagacaaaatccagcgggcggcgcgaaccaaacagcgccaccgtcagcgggccggtaaactccagggccaccgccacgccgagcggaatgcgctgcagggataaataaaagagatagttcatcgccccgagcgctaggccgtacagtagcagcggcacgcgctgcgccggggagaaacgtagccgccatggcttgaacaccaccaccagaatcagcgttcccagcgccagacgcagggcggtgacgcccggggcgccgaccaccgggaacagcgatttagcaagcgatgcgccgctttgaatcgaggtcatggcgactaaaatcaccagtatcggcaaccatgccgccgcttttctggatggaccgggcatcctttctcctgtcaggttttgtcaaaaggggtaaaagttccagtgtactggaattacctgccggcggttgagctaatgttgaaaaaaacaggggcaaaaacagtacaatggcgaaaactgctgagaaattcaccaggcggttaggattaatctggatgcttgcgaatttcttaatgagcgttaagatgtaagttaacgccaaaaattgttgttttccatattgttacagaaatatggaaacttttggttacatgaaaaagtatgttagacaatgtaaactccaaagagtttcccaaaagtttttgatatatttaaggcttaggacttattagaaacacatttgaggtggttatgaataaaattgcacgtctttcagcactggccgttgttctggctgcatccgtaggtaccactgcatttgctgcaacttctaccgtaaccggcggttacgcgcagagcgacatgcagggtaaagcgaacaaagctggcggtttcaacctgaaataccgttacgagcaagataacaacccgctgggcgttatcggttccttcacctacaccgagaaggataacaacagcaacggtacttacaacaaaggtcagtactacggcatcaccgctggtccggcttaccgtctgaacgactgggcaagcatctacggcgtagtgggtgttggttacggtaaattccagaacaacaactaccctcataaatccgatatgagcgactacggtttctcttacggtgctggtctgcagttcaacccgatcgaaaacgttgctctggacttctcctacgagcagtctcgtattcgtaacgttgacgtcggcacctggattgctggcgtgggttaccgcttctaatcactccggtgatatgaaaaatccgcctctcggggcggattttttttgcctgctgacggccggcccgggcgactggccgggccggcgcgattaattgactgtgaactcatcggtaccgaggtgagcgtagtccaccttctgcagctggaagttggtgatgtacaccggaccggccttttgctcagagataaaccgatagcgtggggtgatttccgccgcctggatcccggtccactgggagaagaaactgaggaaatcattcgccgaacgctgcgccttaatcactttatgcgctttgtcatcgctggatagcaccataaacggcacctggaagttctgctggaacttatcatcatgcgccagatactgcacctctttgccccgctccttgaacgccagaccatgatcggaaaaataggtcagggaaaaagtgtcaccggaattttgcaactgatgataaagcttagccagcagcgaatcggtctgcgtcatgctgtagaggtagcatgaggtctctttcgactgaacgaaaaccgtgtatttgcccttggtccgatcgcaggcctgtgggtgagagcccatcaggtgcaggacaatcagctgcggctgggtacgctgggttgagagcacctgctcggtcagcttcagcaactgctcgtcctgggtgtttttattggcttcgaaatcgccgtttttcaggaactgtacttcatccgcccgtttggcgatgctggcgatagcggtgtcgtactcgccaatttgcccctggttggagaaccaccaggtctggaaaccggcgcggttggcgagggtgacaaagttatcctgatactgtggtttgccatcgaccacccggttaagcgtcaggccgagcgatttctgcgttgagccgctggcggcgatgtagttgttaaacagataaccgtttaccgagctggcaaacggcgtgttgtcccaatggccaccgaaagcgccgagggcatcgcggcgcgcgctttcaccgatcaccaccacatagagatggtattttggctttaccgccagcacgtgccagctgtctttcatgccagccagctgcgccatccgggcctgttcgtccagcacctcgttgttattcaccaccacgtctttgacaaaacgaaaggccggataaccggtgtcaatcaccttgaatacaccgccccaggcaaggttttgcaccggctggagaaagaagatcccgatgctgaacaacaggcccagcgtatccatttttccccagcgtgatggctcaacgatcctacgacgaaccgcaatgaccccgagagcgaagatgaagaccgccagcagatagttgtaccacgggaagatggtcaggatttccgtagactcttccacgttggtggcgtgcagcgccagcagagtgttgaagttgggggcaccgtaggcctggccaaagggatagtacagagccgccagcagggaataggcgccgaccaccgctttctggacgcgcggaaaggcgcgccagagcagatgtaacacgcaggtaaatgccacggtataaagcaggctaaattcatagcccagcgccaggttaattaacagcgactgtaaaaagtagaatcccgtccatgggttcagtgccagtcggcgggcgaccagcgtatctttcagggtggtgacattcatagtaaacaatcaaaaagaggccatgcgcatcccctggcgtcaaggggtaaaacctgctggacagtgcgtgaagagggtctctgcgagccgcgaatgtggcagggctgtgcaaagatagggcttgtaaatggtaaggtcaaccagacataacagattgttttgcgagggcgcttacaaaacttgaaaaaaggtcagggaaacggggggaaccggtcattttaccggcagaaaatgacagaaaaatgaagcggcgtaccgcgacgccgccttaggaattgggtttgccctgctgcggtttaccgttgatcatctcgcacagcataccgatcagcattaatcgtactttaaagggggaatggctaaacacgtttatgcacctcttgaattcattcatctgctctcctcctgccagttcgctccgtcattccctgatggatgtttgcattatatacagatatagcacaggctatattttatagctatggctaaaacgttaattttttgtgctcttggcgcaatccattacaatgtggatctttttatacgatgcttgacgcgtcacacgaatgaggaagcacaatgaaccgtcgcgcaggtaagccaataacaaaaaaagtgacgcagttagtgaatgttgaagagcacgtggaagggtttcgccaggtgcgggaagcgcatcgccgcgagctgatcgatgactatgtggagctgatctccgatctgatcaacgaagtgggcgaggcgcgccaggtggatatggccgcgcgtcttggcgtttcgcaacctacggtcgctaaaatgctcaaacgcctggccagcgtcggtcttattgaacagatcccctggcgcgggatcttcttaaccccggaaggtgagaagctagcccaggagagccgcgagcgccatcaaatcgtggagaacttcctgctggcgatcggcgtcagcccggagattgcccgacgtgatgcggaagggatggagcatcacgtgagcgaagagacgctggcgatgttcctgaaatttacccaaacacagggatctcaggaagcatgactcttcccttcgtccagtcgctgctgcgcgatcgttttctccatttgctgctgattatcgcctgcgtgctcagcgccatcgtgccgtttgtcccggcaagctggccggcggccattgactggcataccatcgtcacgcttagcggcctgatgttgttgactaaggggatcgaactgagcggctattttgacgtgctgggccgaaaaatggctcgccgctttgtgactgagcgccagctggccatctttatggtgctggcggcggcgctgctgtctacctttcttaccaacgacgttgcgctgtttattgtggtgccgttgacgctgacgctaaaaaaatggtgcgccatcccggtgaaccggctgattattttcgaagcgttggcggtgaacgccggttcgctgctgacgccgatcggcaacccgcagaatattttgctgtggggacgatccggcctctctttcttcgggtttatcggtcagatgctgcctctggcagcggcgatgatgctgaccctgctggcgctgtgctggttctgttttccggcgaagcggctcagttaccagagcagcgacagggcgccgtcatggcaacctaagctcgtctggagctgtctgggactgtatgtggtgtttctgacggcgctggagatgaatcaggccctgtgggggctggcgctggtgctgctgggcttcctggtgctggcccgggcggtgatcgtccatgtcgactggtcgctgttgctggtgtttatggtgatgtttattgacgtccatctgctgacccagcttccggcgctgcaccaggtgctgagcggggtggggaccctctccggcggtggactgtggctgaccgctattggcctgtcgcaggtgatcagtaatgtgccctcgactattctgttgctcaactatgtcccgccgtcgatactgctcgcctgggcggttaacgtgggcggctttggcctgctgccgggctcgctggccaatattatcgccctgcgtatggccagcgatcggcgcatctggtggcgcttccatctctactccattccaatgctgctatgggcggcactcagcggctactggctcttcaaactctgcgcctgatctcaacagaatcgcgccatcattcacatcgatcgccaggatcgcctttcggggcgatctttttttgtccggctcacagaaaccgatcccgacctttgcttaccttttcactttccggtatatgactagtcattatgtttaaatgactagtcatataccgaggcgcagcatgaagaacagactaccggcagattttttatggggaaactccgtctccagcatgcagacggaggggcgtggaacgagggtggcaaggggatgtcggtgtatgatatccgtcaaccggcggagttcgcctccgactggaaggtggcgaccgactcttatcatcgttatcgggaagatttcgatctgatgcaggatttgggcatgaactgctaccgttttcagatcgcctggagccgggtgtgccctgacggagatggcgaattcaatgaacaggggatcgccttctaccatcaatttatagatgaactgatcgcccgcggcattgagccgatgatctgcctgtatcacttcgatatgccgctgtcgctggcggagcgctacaacggttttaccgaccgccgggtgatggacgcttttatccgctacggccagaagatgatcgcctgctatggcgacaaggtgaaatattggctcacctttaatgagcagaatctgtaccattcgccggaagcgtttctgatttccggctatctgcagggggagaagaccctgcgcgaactgtatctgatccagcatcatgtgatgatggcgcacgtccatctgactcactatctgcaccagacgaagccgcagtgtctgatgggcggaatgctggctcacgctctggtctatccggctacctgcaaaccacgcgatatcctctgcgcccagcagctggatgagttcttaaaccagaacctgctgcgcgcctacgcgggtgagggttatagtccggaggtgatgcattttgtcgccgcggaagggttcgatgatatctatcgtcgggaggatctcgccctgatggcgacggtgaaggtcgattatctggcgttcagctattacgccagccgcacattgaacagcgacgcgatcccgccgggaacggcggtcaacaactatatgctgtttggcaaccaggataacccgttcctgaaagcgacggaatggaactggcagattgatccgctgggcttccggacgatcatcactcgttactataacgattggcgcctgccggtgttcccgattgaaaacggcatcggggtgattgagtcctgggacggcgaacatcccattgccgatgattaccgcatcgcttaccatcgcgaccatatcaacgccatgaaagcggccatctttgaggatggggcgcaggtgatcggctatctcggctggggattaatcgatatcctgagctcacagggcgatatgcgtaagcgctacggcgtggtgtacgtcaatcgcgaaaaccatgacctcaaggacctgcggcgggtgccgaagaagagctatgcatggctgaagcaggtgttccgcagcaacggcgaagcgatgtaacgctgccctggcggtcagatggtgtatccagcccgccagccactcactgaatggataaggaccgggaaatgacggcgaagtatctgcaaatcgcgcgggaaataaaaaaacgcatcatcagccagcagtatcctgccagcgcgccgctacccgaccagtttgcgctggcggcggagttcagcaccagccggatgaccatccagcaggcgatgcgccagttaatcgtcgaagggctgatctatacccgtaaagggcagggcacctttgtgcggaaaaatttccttcagctgtcgcagtgggagctgcccggcagcgactatttcggcgccaccaaaacctgggagcatcttggcgaggtgcaaagcgaagtggtgcgctttgcggtgcgctttcccagcgacaaggagcaaagttcgctgcttatcgacgccgatgccccggtgtatgactttgttcgcctgcggctgctcaacggcgagccggtatcgctggatctgacggtcatgccggtggggctggtgccggggttaaccaaaagccatctggaaggttccgtgtttcgctatgtgcaggagacgctggggctgaagctgatgggatcttaccgcgtggtgcgggcgatgaagcccggggaactggataaacagcatcttcactgcgaaccgaccgatccggtgctggaggtggagcaggttatctatctggaggatggcacgccgctggagtacgcccactgccattatcgctacgatcacggcgggattattctggtgaataacggctaggccggggctcctgctggcggctgcgcatagcggggttacggcgtggtagggtttggtagcccgggcgagcgttagccgcctcgagggaaaatgccgataaaaaaacggcgggcatcaggcccgccgtttttcttgtcagcacaacttagttcagacgcaccggcataccggagcggttctggatagcctgctcaaccacgttctgatcgacatcagactggctggtaactgcctgtaccggctgagtcagggtgatcggcacgatctcgccgccctggaactgcgcttcggtggtcgacagcgggttgtgcacctcgatgtaacggctgccgtccggctcggtggtcgcttttaccggctcatcgataaactgtacgcgggtgccgaccggcacgttctcaaacaggaatttgatgtcatcgttacgcagacgcacgcagccgtggctcacgcgcaggccgataccgaagttagcgttggtgccgtggatggcgtacagacggccgatatacagcgcgtacagccccatcgggttatccggaccggccggtacgacggctggcagcgggttgccggcggcggcgtattcagcatgcattttggcggtcggtgtccaggtcgggccggccttcttgcgttcgactttggtggtccagttgatcggcgtatctttacctaactggccgataccgatcggcagaacgatcacggtattggtgcctttcgggtagtagtacagacgcatttccgcgctgttgataatgatcccttcatgcacggtatccggcagaatcagctgctgagggatgttcaggacgctaccgcccttcggcaggtaagtatccacccccgggttggcttccagcatgttggaaagccccatctgatatttcgccgcgaagtattccagcggctgtttgttatcatccggaatggtaatgacctgattctgaccaaccaaacggctgccatcggttggcaaaggataggtgacagcagacgctgtattgcaaaagcctacgatggcgaaggctgccgctaagagtgtagataatttcatagtctttaatgtcgtgtgcgaaatcaacgccacacaggcctttgttaatgattgagacagtagatgggagcgcattatatgtgcattccgctgaacaggtaaatcagatgtgtacgaaatcacatttttttccctgtcgcctcggctgccgcggtccggcaggcggccgaagcatcgctcgccgcgcgggtaaagggcggttactcttccagcagccgggcctgcagcgcggcgcgaaccggcgcggtaagctggtactctgccgccagccaggcgtcgacggtgccatagcgctggtgaatagccgacagcgcggcggcgagataggactcttttaccgtcagaatatccgccaggctttggcgcccctgggcagtgaggtcgttgccgagcagctccaacatccaggcctccacctgcgtcagcatgccgtgggtaaggagatactcctccatcaccgtttcgctgtcgcagccgacggcgaacagcgttaacgcgcagccgacgccggtgcgatctttgccgaccgcgcagtgttgcagtaaagcgccttcaaaaggcgtggtcagccaggcggcgagctggcgataggccgggttgttaaacggcagctggcggtagagttgcagcataaactgctcgccgttcagcgcgttaagggtggcggcattcagctcggtgaccttcgcatttacctcgctcaccggcggattggccggcgcgttaagataatgggtaagcgggctaagcttgtccggagtacgggctacctctccggggtcgcgatagtcgagcacccggctgagcggcaaagtatcgaggtggttgagatcctccgccgttaaccggtttagcgcgccggatcgcaatagcttgccgctgcggacgcggcgtccgtcggcggcaagctggccgcccaggtcgcgaaaattgatgccgccctgcagggataaaaaagccgggtgtcgcgataggctgctggtcatgggactccttataaatacgtacagaataaccgtttgagcgcgggtttccggctcatctgacaaagaccttagcacaagcgccgcggtggaatttaccgcaggccgtgaaaagtgtgtcatttgctggcataatgtctgctgtatcacacccctcatactcttttttcaggatatccccgtgctagtatccagcaacgttaccatgcagtttggcagtaagccgctgttcgaaaatatctccgttaaatttggcggcggcaaccgttatggtctgatcggcgccaacggcagcggtaaatcgacctttatgaagatcctcggcggcgatctcgaaccgacgctgggcaacgtttcactcgacccgaacgagcgcatcggtaagctgcgtcaggatcagttcgcctttgaagcgttcaccgtgctggatacggtcatcatgggccacggcgagctgtgggaagtgaagcaggagcgcgatcgcatctacgccctcgctgagatgagcgaagaagatggctacaaagtggccgacctggaagtcaaatatggcgaaatggacggctactcggcggaagcgcgcgccggcgaactgctgctcggcgtcggcattccggttgaacagcattatggcccgatgagcgaagtcgcgccgggctggaagctgcgcgtcctgctggcgcaggcgctgttttccaatccggatatcctgctgctcgatgaaccgaccaacaacctggacatcgacaccattcgctggctggagcagacgctgaacgatcgcgacagcaccatgattatcatttcgcacgaccgtcacttcctgaacatggtctgcacccacatggcggatctcgactacggcgagctgcgcgtgtatcccggcaactacgacgaatacatgaccgcggccacccaggcgcgtgagcgtctgctggcggacaacgccaagaaaaaagcgcagattgcggacctgcagtcgttcgttagccgcttcagcgccaacgcctctaaatcgcgtcaggccacctcgcgcgcgcgccagattgacaaaatcaagctggaagaggttaaagcctccagccgtcagaacccatttatccgcttcgagcaggataagaaactgttccgtaacgcgctggaagtggaagcccttaccaaaggctttgatgaaggtccgctgttcaaaaacgtcaacctgctgctggaagtgggcgaaaagatcgccattttgggcgccaacggcgtgggtaaatccaccatgctgaaaaccctggtaggcgaactgcagccggacaacggcagcgtgaaatggtctgaaaacgcgcaaatcggctactacgcgcaggaccatgagtacgagttcgaaaacgacctaacggtcttcgaatggatgagccagtggaagcaggaaggcgacgacgagcaggcagtacgcagcatcctcggccgtctgctgtttagccaggacgatatcaaaaagccggcgaaggtgctttccggtggcgagaaagggcgcatgctgttcggtaagctgatgatgcagaagccaaacatcctggtgatggacgaaccgaccaaccacctggatatggagtcgattgaatcgctgaacatggcgctggagatgtatcagggcaccctgatctttgtctcccacgaccgtgagtttgtcagctcgctggcgacccgcgtcctggagatcactccggaccgcgtgatcgacttcagcggcaactacgaagactacctgcgcagcaaaggtatcgagtaatccctgtccgttacccgggtagcggctacgccttacccgggcgacacgcggtgccgtttttttgtcgggtggcggctaacgccttacccgacctacggttcttgcgacctgcctttaatgtcttcaccgcgctggctgaaactaccggcctaaggtcagaacctccactccgttccttcaacgccattcaccagcagcttacgcttttctcctaccggtaatgacagcttcagcgctttccacgccgggcgatagttgccgcgggcgttgatatccaggtttatgctgctggcgctgcaggtcatttcccactccagccatagcgcatccccctgtttatagccccagctttcgccgtcgtcttcaaacagcagaccgcgggttgagccggtacctttcagcgggaacagctgcagttcgcgacgatcgtctttttgcgcatcgacatggctgatacgttcactaagcggcagaccggcgccggcgcggaccaacagcggcagtttttccagcggcgcgtccagcgtcacccactggccgccggcgaaccactgatggctgtagaaatcgtaccaaccggcctgattatccggcagccatacttcacgctggcgggcgcccggctcgaccacgctggccaccagcaggtcgcggcccagcaggaagtcatcgcattcggcgaaggtctgcgcatcgtgctggtgatcgaggaaggtcgggcggagcatcggctcatcatcagcatgcgcctgccatagcagagtgtacagatagggcagcaggcggtagcgcagctcaatggctgagcggatcgccggagtgatggccggatacatccatgcttcgtttaccgtctggtcgtcattccacgagtgaatggtaaagcgcggatgcatgacgccattttgtacccagcgcacaaacagttccggctcgggtttatcgccggagaaaccgccgacgtcgtggccgacgttaaacagcccggaaaggctcatccccaggcccatgcggatgttatagcgcagcgtatcccagttggtgcggttgtcgccgctccaggtctggacgtagcgctgcatcccggcgcagccggagcgggagatcagatatgggcgcttttgcggcgcaaagcgctgctgggcttccagcgaggcgcgcatcatcaacagcggcatcaccgggcgaatatgtttgatggcgatttcacggccaaagccgtagcagcgggcttcgccgtcccatacttcgtattcgttattatcgttccaggtcgaatcgatgcccatctccagtagctgggtggtcacgccttcctgccaccaggccaaggtttgcggattggtgaaatcgagatgcgacccttcatcatcccagaagctggaacgctccggagcgtcagtttgcgaatcgcgaatgaagagaccgcgctccgccacctcgccgtagcgcgggtgatcctgcagcaggcacggtttgatattggcggccagcttcagcccggcatcgtgaaacgactggctcatcactttgggctgcggcaccttgtcgtagttccagttaaagacgtagcgcttgccgttgattgaggtatagccggaagagagctggaacgaatcgcaggggatcgcgtgctgctcgcacaggcggataaagttcatcagctgattttgcgcatccggcgcgtcggtatagtgcatggtggagccgctgtagccgaggctccatttgggtccaaacagcgttttaccggtcaggcgaacgaaggctttggtcacatccagcacctgcttaccggtaaacaggtaataatcgatgtcgccggcttccgcctgccagcggcgataggcggtgtggtagttgtcgatctcgttccccagatccagccagcagctgctcaggttgtcatagaacaggccgtagctgatatcgctgcgctgggtgatggtgaacggaatatgtttatacagcgggtcagtgctgacggcgttgtagcccatggcatcgaggttacgcatctcatagcgtttaccggtgcgctgcaggtcgccggccttttcgcccaggccgtagaaacgctcatctttgcggcggctcagataatgggcgacgccgtcgccgtgggcattcgccaggtaggcgctggtcggacggtcattggcaagcggctgccattcgccggcctcgtcgcgatagctccactccagccacagcggctggtgaacggtgacgcgcagctggcgggtggcgatagtcagcgtatcgccctcctgggccagctgccaggccgggagactaaaaccgctgaggtcatcccgggcgcggccttcccacggcacatcctgctgcggagcgatgctccaggtgcgatccagcgccagctggccctggcgttttagcaggacgcggaacaaattctcttccagtacatacaggcacagggtgtgctggccatcgaccgtcagttcaacgtgatgctccagctgttgatgcaaactccagtgtttcagcgtcttcatatcttacatccactctcaggcgcgcttggcgcgacgttcagcaataaatgccaccaggaaaacggcgccaatcaggtcaaagaaacccatggcgataaatagcgggttgaagccgattttgtcggcggtcaccccgattaataacgagaacaagaagctggcgatccacgctgcggagccgcgcataccgttgaccgtcgccatttgtcccttgtcgaaagactccaccaccagcgcgctgagcatgcaggagatgatctgatggccgaagccgccaatggagatcaggatgatggtgatatagggatcgcgggtgatggcgacgagggccagggagagcatcaggaacgcgccggttaccgagctggcgatcaccgagttcactcgcgtacagccgaaccagcgaacatacaggcgggtgaggtagccgctgaccacgctgccgagatcggcggcgagaaacggcagccaggcaaacatggcgatctgcttcaaatccatgccgtgctctttcgccaggtacagcggcacccagaaactcagcaccgcccaggcgggctcggccataaaggcggggatggcgatcccgtagaaacgtttatttttcgagacggttttgagcgcggtaaagaagggctgttttaccggcggggcttcgttatcctgtttgatgtactccagctcgcttttgctgagattggggtgcttttccggggtctgatagaaggcccaccatagtactacccacagtagcgccagcgcgccggtaaacataaacgccccttgccagccgaaggaggcgtgggcgaagtagatgatcggcggggccagcatcgcgccgatggagaacccaacgccagcccagccggcggcaatcgggcgttcagatttcggaaaccattcgccgatggttttggcgttcgccggagtagcggccgcctcggccccacccataaagaagcgcaaaatagccaggtgcagccagctaccggccccggcgtgggcgatacaggccagcgcccacagggtggcgcagatcataaagccaagcttcaggccgatgacgtcgataagccagccgcacagcggctggaaaatcgtgtaagccagctgaaacgcgccgacgatccacgagtattgttcggtagtaatgccgagggtcgctttcagttccggcgcgataattcccagcgagttgcgtgtgatgtagttgacggtaacgccaagtaaaaacaggaccagcacccaccagcgcaggtttttcactacccggcgcgttttgctgacggcgatatcattgttgaggccttgactcatagcacactccacaagacgtttgtagggggaaagtgacggtctcactccctgagtggtcacgtagatttattaactatttgaatagtctatttttaatctcaacatcattggtataactagtatgggagatgttggaccaattcaggctagggcagaaaaatcgtctggcaaagcgctatttatgcaagttttttcatgaaatgagcgagatcgcatatttgacagcggaatttgcttgtaacgtgtgctttggcgattatgaaaattctttcatttttcaatcggagctggatcacaaaatggataaaaagctgcgcgtcgccgaaattgccgcccgcaccgggctatcgcccagcaccgtttcacgcgtcctggccgggaaagcgaataccagcgacaaggcgcgccgggcggtgctggactgcgcccgcgagctgggtgtcatgcaggggttggccgccgggcgtctgctgctcaatcatctgctggtgtttgccccgcagcgcgcattcgatgagcgatcggatatcttctactaccgggtgatccagagtatcaataacgcgctggcggcgcatgaagtgcgcctgcgctactgcgcgctggatgagaacgacagcgacgccaacctgtttcttgcccgcatgaatgaacctgagacccaggccgcggtgctgctggggatcgacgatccgcatattcatggcctggcggcggatctgggcaaaccctgcgtattgatcaactgtcgggatgaagggatgcggctgccgtccatcgctcccgatcatcggctgatcggccagtgcgcggcccgctatctgtttgatatggggcatcgggcggtgatgaacgtgatgtgcctgcgccgctataccatggagctgcggctgggggggattcaggaggcgtggcgcgcgcgtaatctgcgctttaccgccagccgggatcttatcagcgtcgccaactttagcgccagagagacggaagagcaggtgggcgcctggcttgacggcttacagggcaggccgttgcccaccgccttcctggtgggcggcgattttatggccgccggcaccgtcagcgcattgcaaaagcgtggcctgcgggtgccgcaggatgtctcggtgatgagcattgacggatttaatctggcggcgattcaggaggtgccgctgaccgcggtgcatgtgccgcgggatgagctgggcagcgaggcggtgcatctcctgcagcagcgcctgctgcgcccggaggcgccgcacggctcgctactgctgcatggcacgctggtggtacgcgattcggtacggcggatccggccgggcaaaggccataccgccgtcgagccgcaggggctgtatgacgattagaccggcatacccagcgcccgtttgccgtggatattcagatcctccagggtgaagcgcccctgccagctggcttcatagtcctcgcgcgggaaatcccccggcgaggcgcctttttccagggcgattttcactttctgcgcgtaggcgaggttcttctcgcacatcggcgcggccggaatgtacatcacatttccccagccctgctgattttccaccggcgccaccgagtgaatgatgtcgcagtgccaccagacggagtccccggcattcagcgctggaatcgagcttaacgctttaattaagagcgggtgccactgctcagagatcggcagcactctgcccggcgcgacgccgcacagctcatcttccggcacatcgtcgagcagggggcgcagcagcacataagccatcgcctccgggatcggcaccacgtgcagcagcccctgacccgggatcatgtccgacagcgcggtccagccctggaaggtgcggaacaccgagcatttggtggtgttgtcgacggtatactcttccacttcggtacggtgcgcggcgtcccacgggtcgtaggcgtcgatattgccattaaaaacgttggcgaaaacctgctgataggcgggaagcagccagcgctccagcgcgccggaatcggtatgcgcccccagccccttcgaagtggttcccggcgggcggcggcggatgcggtcgggatagatcacgctgacgtccggatcgaaccagcgtttgccattctgttcaaaacgccacaggcggttgaggaaagattgcactgccgccatttcatcgctctgccgcgcctgcatttgcgagggcgaccagtagatcgggtagatctccgggcgcgaagcctccagcgaaccgaagaagctgtcgccaggccctttgtaaacatcgtcgaaatggttgcgatccagatattccagcatcgcggtatcccacgccagcgcctgttcgcgtgggaagtggcctttaatcaccgcgcagccccggcgcttaatggccgcgcgctgctcatcgctcactgttccttcggcgatatcgcggaacggaatggttggccagacctcctggcctgcggctttcagtgtctcaatctcctgcagccgctcgctgatgcgcgctgagagcttatcgaacaccgcctggacgtcgccaatttgcgcccgcagggcctgtttcatctggcgaatcgccgctttgtgatcggcgggaagtgtttcgtgggtcgggagagcagccataataacctcgctgtatctttcattcgaaagtataaaatcttacaaacgttaatttaagttaaaatggagttaatgcaagtttaaaatcttgctgcggcgcacaaaatggaaaaccggggcgcgatgccccggcgaagggtcaggcgttgaagggcggggtgttatcgaggacggcctggataacgttcagcgcgccgtcatggttattatcgtcggtagtgtagccggcgatggccttgatgctgtcggcagcgttacccatggcgaaagcgtatttcaccagcttcagcatttcggcgtcattgccgctgtcgccgatggcgacgcattgctgcggcgaaagatcccagcgcttgagcaaacggctgatgccgttggctttatgcaggccagggataatcaaatcgacaaagccaaagccgctggtgaccggcttcatgatgccgtcgagcgacacgtgcagtttattaatcagctgtgggatctcgctgtccggcaggttgagagagaatttaaacagcgtatcgtcgatggcgtgatagtcgctcacccgctgtaggcgatggtagtgcttcgacatcagctcaacaaaggcgtccggagctttatcgctgacgtaggcgctctgcaggccgcaggcgacaaagttgagctgcggatctttgagcaattcgccaatcaccacttgtgattcgtggcgggtcagttcgccgtggaacagctgcttgccatgttcataaaccagagcgccgttttctgcgacgaacgaaatctgctcgcggatctccgggaagaaggagatcaactgatagtactggttgccgctggcgacaacaaattcaatgccgcgctgctgcaactgggcgaattgcgccagaaaccgtgagcgatcgtaggttttggcgtcattgagaaaagttccgtccatatcggtgacgataactttaacggtcataaggggatgctcctggcttaacttcgaccagtaacattctaattacaatgtgatggagagcacaaatttatttcgaatgaaagttcaggcattcagaaaatgccggaagggcatgtcttttccggcctgcagaacagggttggcccgctaagcatagcgccagcgggcacgaaggattacagcgtatgttcggtacgggcgatgatatcgtcctgggtatccggcgacagggcggtgaagaacgccgagtatccagcgacgcggaccactaaatcgcggtactggtcaggatgtttcttggcttccagcagcgtgtcgcgcgacacgatgttgtactggatatgccagcctttgtgcacctcgaagaaagtgcgcagcagcaccatcagcttctgcttatcggactcgttctccagcgttgacggattcagcttctgattaagcagcacgccgccgaggatcgccccggtcggcagcttgcccaccgaactgataaccgccgtcggccccagatggtcggtaccggaggccgggctggccccctccgccagcggggtatgcgctttacggccatccggcgttgccatggtctgcgcgccgaacgggacgttagcggaaatagaggaggtgccagcgtaataattgccgccaatcgggccgcggccatagcgcgggttgtgatactgcttcagctcgtcgatataggtctggtaggcccgcgccagcagttggtcgacgctgtcatcatcgttaccatacttcggcgcgccgttgatcaaccgctggcgcagctgctcgtgggtcagaccgtcgaaatcttccgccagcgccttcgccagctcctgctggccgatggcgccctgatcgaagaccagttttttcaccgccgcgaggctgttgccgaggttggcgatacccacctgcaggccggaaacccagtcatacttcgcgccgccctgcttaatgcttttcgcccgttcgatgcagtcatcgaccagcgccgagcagagaatatcgtggacgttctcttccagcatggtatcgaccacgtactcaatctcgatggatttacgggtgtagtaacgaatctggcggtcccagtcggctagcacctgatcgaagttagcgaagttgcctttcgacagggcgtgctcctgcggcaggaacacctgaccgctggtggcatcgcggccgccttccagcgtcgccagcatcacccgcgcgaagttaataaagctcatgccggtgcagcggtagccccacttaccgccgaccgcggtttcgatacagccgatagccgcgtaatcgtaggcgtcctgcggctcaatgcccagcttaatgaattccgggatgacgatttcatcgttgttaaacgccggcatgccgaaaccgcagcggatcacctggacgcaggcgtcgaggaagtcgttgctcatcccggcgtggtagcgcacgctgaggttcggctgggtagaacgcaggcgaccgcaggattccaggatcgcatacgacagcgggttgaccgcgtcctgcggcttaccatccaccagattctggccgccgatggtgacgttctggtatagcgggctgccggcagaggctttggagtgtgagccggaacggatcttattgacctccagcagcttcagccagcagctgtgcagcagctcaatggcctgttcgcgatccagcgactgttgcaactcaacgtcgcggcggtagtacgggtagaggtactggtccatacggccgaaggataccgaatggccattggattcaatctgcaggataagctgaatgaagtagcacagctgcagcgcctgccagaaggttttcggcggctcatgggcgatgacgtcgcagttttcggcaatcgtcagcagttcgtggcggcgtgattcgcgggattctgctgtcgccatctcgcgcgccagcgcggcgaagcgtttgctgtgatcgctgaccgcttccagcacgatatcaatcgctttcaggaactgctcgccgtgcaggtcttccagtaccgtcaaattgatacgcgagcggcgttcggcgactttcgcacgcatcccgtcgaggcctttctccagcagcaaggggtagttgaccgcgaggtgagcatccccggaggtcatattgccttccgccttaataatgccggtggcgagcagcgccttttgctcatcggtgaacataccgtagcagcggtcttgtacggtctggccgcgccaccatgggcacacttcatgcaatacgcgtttattctcctcgctgaccgagaagccggcgccggggcggtcggcgagatcgtcgatctctttctcaatccagctgacggtgtattccgggaaaataggcgcggcgcgcacttcgctggcctggttaccgacgatcagctcatcgtgcttgatccagatggtgcgctccgccaggtggtgagccagcgccagcgcgcggcgcaccgggatcggtttatcgagatgctgctgatacatctccgtatagtgacgggcgcgctcggtacagaccggcggcttgacgatatgcaccagcgccattttatgggcctggatacgggcgctgagggtgttgagcttcagggttgtcatagggttatcctcgtaatatcgccgttagccccttgctccgcgcataatcttgcgcgaaggcgagcagctcaggagcgtccagcggtttgtccggtgcggtgtagggctgactgagtaactggtatttgttcattcccagcgtgtggtacggcaggtaatggatctcgctgacctgcaggcgatcggcggcaaaatcggtgatcgcggcaatgtcggcttcgctggcgttgaatccctggatcaacggcacgcgaataatcatttttttccccgcctgcgccagacgctgcaggttatccagcacccggcgggcgctgccgtcggtccactgctgaaaaacggcctcgtcaacgtgcttcagatcggcgagaaacaggtcgacaaagggtaaagacggttcaatgtatttccacggcacgtgcaggcaggtttccacggcggtgtgaatgcctgcctgatgactggcttcgaacagcgcttgcgccagcgttgggttcataaagggttcgccgccggaaagagtgatgccgccgccgctgcgatcgtagaatggtttatcacgcagcaccgtcgccatgatctcctcgacgctcttctcctcgccgcacaccgtgagtgcggtggtggggcagcagtcgcgcagcgcggcgatatggctgtcgttaacgttttgccggtgaatgatcaggccatcgagggtgcgggtgataaccgccggcgccgcctgctggcacagctcgcagccgggcaggcacagccgcgagtcatacagcagatcttcgctacgggcgcggctctccgggttctggcaccagcggcagcccagcgagcagcctttcaggaagacgacggtgcggatccctgggccgtcatgggtggaatagcgctggatgttgaagatcatggcttatcctcttgtttgcgtatgaatataaaaacactttcgaatgaaagttatgttgacgcaaatcaacaagcgggatggggataagtcagagaggagaaaataacgagagcggtcacaaaaccaccggcgactctcgtcgccggtgtgggggtcagtgcgagccgcatacctcgcactgcgggtgacgcatcagcctcatttcgcgaaactggcaggtcatggcatcgtagatgacgatttttccgctggcaggggtgccgtagccgctcagcagcttaatcgcctccatcgcctgcagcgaaccgatgatgcctaccagcggggccattaccccggcttcgacgcaggtgagggcattttcgccgaacagacggctcaggcagcggtagcagggttcgccatcctgataggtaaagacgctgatttgcccctccatacggatcgccgctccggagaccagtggggttttgtgctgaaagcagccgacgttaagctggttgcgaatggcgacgttgtcggtgcagtcgagcaccagatcgtgatcggcaatctgcgccgccagcgccgcctcatccagcaaggcattgagcgggaccagacggacgtgcgggttaatgcgcgccagcgcctcgcgggcggaatccaccttcggctggccgagggtggcgtcgctgtgcagcgtctggcgctgcaggttggagagcgagacagtgtcgaaatcgagcagggtgagctgcccgaccccggcggcggccagatactgcgcggcggcgcagccgagcccgccgaggccgaccaccagcacgcgagcggcttttaaccgctcctggccgtcaaaatcaaaaccgcgcaagacgatctgccggttatagcgcagcatctcttcatcgctcagctcaacggtcattacagccccccaaacaggtgactgaagggttcgacctcgacccattcacctgcttcaacatggccgcgctcacgctccagcacgataaagcagttgccgaggctgaaggagctgaaaatgtgcgagccctgatggccggtggtgttcaccaccagttcgccgtccgggttgcgctgcagaataccgcgctgaaaatcgaggcggccaggcgactttttcaggcgcgtggcggcgcggacccgcaggcggggcgcctgaagcgggccgtgcttgcccgagagtttcgccagcaggggttgcaccagctgacagaaggtgacggtggcggacaccgggttacccggcaggccgcagaaccagctgctgctgagcttgccgaaggcgaagggtttccccggcttaatcgccagcttccagaagccgatctcccccagctcttcgaggatagttttggtgtaatcggcttcacccactgagacgccgccggagctaatgaccacatcggcctgctggtcggcggcgataaaagcgtcacgcagcttcgccgggtcgtcaggaataatgccgaggttaatgacctcgtagcccaactgctgcagcatcaggtgcactgccaggcggttggtatcgtaaatctggccgtcgccgagcggttgacccggcagctgcagctcatcgccggttgagaagaccgcgacgcgtaccttgcgcaccacctcgacctcggcaatgccgaacgaggccagcaccggcagctcggccaccgtcaggggtgtccccgccgggaagaccaccgcgccgtgggcaatatcttctccgcggcggcgaatatgctgcccggcttttaccggcgcgataaagcgcacgccggcctcggtctgttcagtctcttcctgcatcaccaccgcatcgcagccttccggcaccggcgcgccggtcatgatgcggatacaggtccccgacggccaggcgtcgttgaacggctggccggcgaaggccttaccggcgaccggcagcgccgcgccgtcgcgaaggtcgttcagccggacggcatagccatccatcgccgcgttatcaaagccgggcacatccagcggggagacgatgtcatgggcggtcacacgcgagaaggcctgcaacagcggtacagtttccgtcgcgttcagcggcgtaatacgatcgagcatctgggcgagggctgtgtcgagcggcatcagtccggcggtaaaatccatgggtcactcctgcgggcaaaacagcgaaaacgcctattatggcagaaaagcggcgcgggctgtatgccacctgggtacgaggctttacatcgcccgccgctctttctatattcaaaaattgtataagacattcagcaatataatgatatcaatacccttattcatgacgtgaccggcgccgcgccgcggtacgacagggcaggggcgatccacttcatcgttaaggactggcgaaatgggcaaggcggttatagcaattcacggcggcgcaggggcgatttctcgcgcgcaaatgacgccggagcgggagcgagagtatgtggcggcgctgtcgactatcgtcgaaagcgggcagaaaatgttggccgcgggcgccagcgcgctggatgccgtgaccgaggccgttcggctgctggaggagtgtccgttgttcaacgccggaatgggcgcggtatttacccgcgatcaaacccacgagctggacgcctgcgtaatggacggctacagcctgcaggcgggcgcggtagccggggtcaaacatttgcgtaatccggtgctggcggcgcgtctggtgctggagaagagtccgcacgtattactgatcggcgagggggcggaaaattttgccatctcccacgggatggcgcgcgtggataacgatctcttttccactcctgaaaggctgctgcagctgcaggaggcgaaagcgggcggggagattatcctcgaccaccacgccgctccccttgacgaacgccagaaaatgggcaccgtcggcgcggtggcgctcgatctggccggcaatctggcggcggcgacctccaccggcggcatgaccaacaaactgcccggacgcgtcggcgacagcccgctgccgggcgcggggtgttatgccaataatgccagcgtggcggtctcctgtaccggcaccggcgaagtctttatgcgcaccctggcggcctacgatatcgccgccctgatggagtatgggcagctcagtctctattccgcctgcgagcgggtggtgatggagaaactgccggctctcggcggcagcggcgggctgatagccgtcgatcgcgaaggcaacgtcgttttaccgtttaacagtgaaggcatgtaccgcgcctggtgctatgccggcgatacgccgaccattggcatttatcgcgaatagaacaagggagagggcgagtgtcgcaaactcacgaaaccgatacctgcgaagtgctggtggtgcgcaacctgaacgtggcgttccgccagcaggatgcgccggaggtgcaggccgtgcgtcagctttccttcagcctgcgccgcggcgagacgctggcgatagtgggtgagtccggttcgggaaaatcggtgaccgcgctggcgctgatgcgtctgctagacgcggccagcagcgaggtgaacagcgaggggctgtggttgcggcggcgtaaccggcaggtgatcgcgctcaatgagcaaacggacgctgagatgcgccgggtgcgcggcgcggatctggccatgatttttcaggagccgatgacctcgctgaatccggtttttaccatcggcgagcagattgccgaatccctgcgcctgcaccaggggctggggcgcgaagaggcgctgcgcgcggcgaaaaagatgctcgatcaggtgcgtattccccaggcggaagagatgctctcgcgctatccgcaccagctctccggcggcatgcgccagagggtgatgatcgccatggcgctctcctgtcggccggcggtgttgatagccgatgagccaaccacggcgctggatgtcaccatccaggcgcaaattctgcaactcattgccgtcctgcaaaaggagatggcgatgggggtgatctttatcacccacgatatgggcgtcgtggccgatatcgccgatcgggtgctggtgatgtatcgcggtgaggcggtagagaccggcagcgttgaggagatctttcgttcgccgcagcacccgtatacgcagtcgctgctggcggcggtcccgcggctgggggagatgcgtggccaggatctgccgcgccgttttccgctgccgggccagccgctggcggagagcgaaacgcccgatacggtagtcgccggcgagccgatcctgcaggtgcgtgacctggtggcccgttttccggtgcgcggcgggctgctcaatcgcgtgacgcgcgaagtgcatgcggtggagaaggtcagttttgatctctggccgggagagaccctgtcgctggtgggcgagtccggctgcggcaagtcgactaccggccgggcgctgctgaggctggtagagacccagggaggcaccattaccttcgacggtcagcggatcgataccctcgccggcggcaagctgcaggctctgcggcgcaatattcagtttatttttcaggatccttacgcctcgcttgatccgcgtcagacggtcggcgattcgattatggagccgctgcgggtgcatggcctgctgcgtggggaagcagcgcgtgagcgggtcgcctggctgctgaagcgcgtggggttgcagccggagcatgcctggcgctatccccatgccttttccggcggccagcggcagcggatctgcattgcccgcgcgctggcgctgaatccgaaggtggtgatagccgacgagtcggtgtcggctctggatgtctccattcgggcgcagattatcaatctgatgctcgacctgcagcgcgagatgggcatcgcgtttctgtttatttcccatgatatggcggtggtggagcgcatcagccaccgcgtggcggtgatgtatcgcggtcgcattgtcgaaataggcccgcgccgcgcggtgtttgaaaacccgcagcacccctatacccgtaagctcatggccgccgtaccggtggccgacccgggccaccgtcatccgcagcgggtcctgctgtctgatgacgtcccgggcaatatttataagcggggcgaggagatcgccagcgtgccgttgcagcaggtcgggccgggccacttcgtcgcccgcgaatccgccgatgtgctgggcagaacataacaacacataacgcatcttttcaggagaacacgatgacacaacctgtttcacgcaaatggtggctggcgctgagtatcgcggcagccctggcgagcgctcccgcctttgccgccaaagatgtggtggtggcggtcgggtctaacttcacgaccctcgacccctatgatgccaacgataccctgtcgcaggcggtggcgaagtccttttatcaaggcctgttcggccttgataaagagatgaagctgcaaaacgttcttgctgagagctataccgtgtcaccggacggcctggtgtacaccgttaagctgcacagcggggtgaaattccaggatggcactgactttaacgccgaggcggtaaaggctaacctcgatcgcgcgagtaacccggataaccatctcaagcgctataacctgtataaaaatatcgccagcaccgaggcggtcgatccgactacggtcaaaattaccctgaagcagcccttctcggcgtttattaacattctcgcccatccggcgacagcgatgatttcgccggcggcgctgaaaaaatatggtaaggatatcggcttccacccggtgggcaccgggccgtataagctcgacacctggaaccagacggattttgtgaaggtcagcaagttcgatgggtactggcagccggggctgccaaagctggattctatcacctggcgtccggtggtggataacaatacccgggcggcgatgctgcagaccggcgaggcgcagttcgccttcccgatcccttacgaacaggcgccgctgctggcgaaaaacagcaaactggagctggtggccagcccgtcgatcatgcagcgctacatcagcatgaacgtgacgcagaagccgttcgataatccgaaggtacgggaagccatcaactatgcgattaaccgtcaggcgctggtgaaggtagcgttcgccggctacgccaccccggcgaccggagtggtgccgccgtcgatcgcctatgcccagacctacaccgcctggccatacgatccggcgaaagcgcgccagctgctgaaagaggcgggctaccctaacggtttcagcaccacgctgtggtcatcacataatcacagcaccgcgcagaaagtactgcagttcacccagcagcagctggcgcaggtggggattaaggcgcaggtgacggcgatggacgctggtcagcgggcggcggaagtggaaggtaaagggcagaaagagagcggggtacggatgttctataccggctggtccgcctccaccggtgaagccgactgggcgctgtcgccgctgttcgcctcgcaaaactggccgccgacgctgtttaataccgcgttttacagcaacccgcaggtggataacgcgctgagcgaggcgctgaaaaccaccgatccgcaagagaaaaccaaactctataaagaggcgcaggatattatctggaaagagtcgccgtgggtgccgctggtggtcgagaaactggtctccgcccacagcaagaacctcaccggtttctatatccagccggataccggctttagcttcgaacaggcggacctgacgccgtgatcatgttcatcttcatgcgtcctctctcccggaatgggagggagcgatgctgaattatgtgattaagcgcctgctgggcctgatccccactctgcttatcgtcgcggtgctggtgtttctgttcgtccatatgctgcccggtgacccggcgcggctgattgccggacctgaggccgatgcccaggtggtggcgatggtgcgccagcagctggggcttgaccagccgctgcatgtccagttctggcactatatcaccaacgtgctgcgcggcgattttggcatttccatggcctcgcggcgtcccgttgccagtgagattgccagtcgctttatgcccacgctgtggctgacgctggccagcatgagctgggcggtactgttcgggatggcggcggggattgcggccgcggtgtggcgcaatcgctggcccgaccgtctgggaatggcgctggcggtgagcggtatttcgtttccggcttttgcccttggtatgctgctgatgcaggtgttttcggttgagctgggctggctgccgacggtgggggccgacagctggcggcactatattttgccgtcgttgacccttggcgcggcggtggcggcggtcatggcgcgctttacccgcgcgtcattcgtcgatgtgctgcatgaagactatatgcgtaccgcccgggcgaagggggtgagcgaaacgcgggtggtgctcaagcatggtctgcgcaatgcgatgatcccggtggtgaccatgatggggctgcagttcggctttctgctcggcgggtcgatcgttgtggagaaggtgtttaactggccggggcttgggcgcttgctggtcgattcggtggagatgcgcgattacccagtgattcaggcggaagtgctgctcttttcgctggagtttattcttatcaatttagtggtggatgtgctgtacgcggccataaacccggctatcaggtataagtaaggtgcgattgcttaactggagaaggcaggcggcgctgaacgccatgccgggcatcagacccggcgagatccataccccctggcatgagttctggcggcgctttcgtcgccagccggtggcgatgggcgctggtattttcgtgctgttgctgattgcggtagccatcgttgccccatggatagcgccgtacgatgcggaaaattatttcgactacgaccgtctgaacgagggaccttcgctggtgcactggtttggagtcgactccctgggacgggatattttcagccgggtgctggtcggggcgcagatctcgctggccgccggggtactggcggtgctgattggcgcggccatcggcacggtgcttgggctgctggctggctactatgagggctggtgggaccggctcattatgcgactttgcgacgtgttgttcgcctttccggggatcctgctggcgatcgcggtggtcgccgtcatgggcagcgggatggccaacgtgatcatcgccgtggcgatcttctcgatcccggcgtttgctcgtctggtgcgcggcaatacgctggttctgaagcagcagacctttattgaatcggcgcgcagcatcggcgccagcgacgccaccattctgttcaaccatatcctgccggggacggtgtcatcgatcgtggtttatttcaccatgcgcattggggtatcgattatttcggcggccagtctgtcgtttctcggcctcggcgcgcagccgcccaccccggagtggggcgcgatgctcaacgaagcgcgggcggatatggtgatgtctccgcacgtggcgctctttccggcggtggcgattttcgtgaccgtgctggcgtttaatctgctgggagatggcctgcgcgatgcgctggatccgaagttaaaggggtagggtgagggaaagctccgccgggagtcctttatgttatctgcggcttcagcgcacattgcgcttccggttaattttctgcgttatgtctctcatggcgcagggagcgcacagggggcggccagtcgccgccgccccctgtacccccgggctccggccagcaacatcgccactgcgtggtgccttcgacttatccctgcaggcttcgggtcgggccgaggcagcgtccgtgcaaaacacggccctcagcccgcatccatgcggcctgccccggcctttcgggaacgtctcagcgatgttgaggccgccagcatcggctgtttcagcggccccatgtccggcggcgattcacatattgggactggaccccgtaggccgggtaagcgtagcgccacccggcaaaataaccgcgcaacagggctgcctggaaggtaatcaatgcttgcccgcggcgctgcgcttgcgcggacccgggggtgagcctacgggaggaccccgtaggccgtggaatgcgctaagccgctatccgggaagctggactagacccgggtaccccacaggtcgtattcgtcggcgtgctcgactttcacccgcaccacgtcgcccggcttaacgcgggtttcgccgttcaggtacaccgcgccgtcgatttccggagcgtcggccatgctgcggccaatggcgccttcttcatcaacttcatctaccagcaccaggatttcgcgccccactttctcctgcagacgctcggcagagatctgctgctgcagctgcataaagcggttccagcgctcttctttcacctcttccggcacctggtccgccagctcgttggcggtagcgccttcaaccgggctgtacttgaagcagccgacgcggtcgagacgcgcctctttcaggaagtcgagcagcatctggaaatcttcttccgtttcgcccgggaagcccacaataaaagtggagcgcagggtcagatccgggcaaatttcacgccactgcttaatgcgcgccagctgacggtccgcagaacctggacgcttcatcagcttcagaatacgcgggctggcgtgctgcagcggaatatcgaggtacggcagaatcttgccttccgccatcagcgggatcacatcgtcaacgtgcgggtacggatagacatagtgcaggcgcacccagatgccgagcttcgccagctcttcgcacagactgaccatgctggtcttcaccggcataccgttgtggaagccggtgcggtgcttgacgtcgacgccgtaggcagaggtgtcctgcgaaatcaccagcagctctttcacgccggcgtcagcgaggcgtttggcttcggccagcacttcgccaatcggacggctcaccagatcgccacgcatggacgggatgatgcagaaggtgcagcgatggttgcagccttcagaaatttttaagtaggcgtagtggcgcggcgtgagcttaaccccctgttccggcaccaggctcaggaacgggttgtgcttcggcttcggcgtataatgatggacatgctccagcacctgctcatagctgtgcggaccggtgatctccagcaccttcggatgcacttcgcggatctgatcctctttcgcgccgagacagccggtgacgattaccttgccgttctctttcaacgcttcgccgatcgcttccagcgattcctgcacagcgctatcaataaagccgcaggtgttaacgatcaccatatcggcgttgtcgtaggtcggtacgacgtcataaccttcggtgcgcagttcggtcaggatacgctctgagtccacgaggtttttcgggcagcccagggagacgaagccgattttcggctgatgcgtgacattgctcatagcttaaaaagtgttcaattattggaatggtcagggcaggaattctacagatctttgcgaaaaagagtatagctccgtcgcggttaatggtgaaaaagcgcccccgacctgtcttttacgccccccaccgccagagcggatcccacacgccccggagcagaggggcgggacacgcttctgacaagccgtgcgcgcaggcggctcaagcccggcgtggctgccgggcagagacttattgcgccgggttaatggctgcggagggcgtggcgccggtttttttcggctcgcgcttatcctgcagcgtgaaaatagagatcagggtaaagagcccggcgacgctgccgagaatcagataggtgttggcgaagccaatggtatcgtacagatagcctgccagcggagagtaaatagcggtggcgatcgaggcgacgaacagcaccagcaaatagaccgtcgaagagagcttgtggtcgaagttggcggcgatgaatttaaagaccgataccagaatcaacggcttctccagagcatgcatcattttcaccgcaccaatccacaccgggccgaggggcacggctgagccgacaatacgtaccgacatgatcagcccggcgatgatcagcgcccatttggcgccggtccggttaacaaaccatggcatcaggcagaggaacagggtttcaccgcagacctgaatagacgcgaggatcccgtaccagcggttgccttcctccggcgtcgggaactgtagcgagaagtactgggcaaactgctgatcgtaggtgtcgtaaatctgcgtgacgaacagggtaaagagcagcagcatccagaactgaccattcttcgccagctcaagggcatgagagaccttcagcgattcgcttcgcgccacatcggcgtcggttaattcaattttggttagcataaagcagatggcggcgatgacaatggcgaggctggcgagccagaaggccagattaggattgctgtctatatatttacccacaatccaggccgccgctgcccagcctaacgagccccacatccgcacacgaccatattcgaactgatagcgccgggaaatcttatcgatataagagtcgattactccgcagccggagttaaagatgatccccagatagatccctcccagcaaggcgccaaaccaaaagttgtgcaccagcagcggcgcgtaaacgtagataaagaaggggcccaccggcaggagcagggcgaccagcagccagataagccgttttttcaggccgaacttgtcagagataaagccgaagaaaggctgcatcagcagggcgataaaggcgttgaccgagtaaagcagcccggtcttcgtggcgctgatgccaagatgctgggtggtccagataacgaagaaagccatggtcgacgaccaggcgaacaggtagaggaaatcgaaaagactcaacagaaggtagtttcttttaccggacgtcatgtttcagttccttgcaaatgggcagagagaatttcagcgatccgcgggccgcgttcgctgttttcctgacatgttatacgtattacattaattatttgttatgacatcctaattgacgatggtgcaacaggtcatatgaggtattgtgatcatcgctgcactaattttgtcttttattgccattttctgtttattaatttcatattgaaattaattgtgatcgtataacattatttttgttatacaccctacaatgcgttaaagttgccacattgtaaatgatgttaaagaactggggattattgacctggcgcatcattttgcacaaaaaataaccgtattatggaaagggtaaaggacgacagaggaggaaccgtgatgaccgttgacagactataccgccaccttctgcagaagcttattaacgccaatatcgatattgacgcctatctgcaactgcgaaaggccaaaggctacatgtcagtcagcgaaaatgaccatctgcgtgataacttgtttgagctttgccgtgaaatgcgtgcgcaggcgccgcgcctgcagaatgccatttcaccggaggagagggatgtccttcgcctggccggcgaatcggtcgccgccgctgcactatgcctgatgagcgggcatcatgattgtccgctatacatcgctgttaacgtagagaagctagaacgctgtctgacaggattgacctcaaatattcataaattgaataaattggcgccaatcactcatgcctgatcggctgaaacccaggggaagtgaacgcttcccctgttaaaggttatgtaaaaatcgccgcgcaaatttccccgctggctaccctttagcccagagctgacgaaaggagaatgccatgcgtccgatcccactgctgttgatattgagcgccttagcgctaccagccctgagccaggccgcggtgcgggtggaggtattgcaaaaccggctggcccagccgtggggcatggcctttctgcctgacgatcagggcatactgatcaccctgcgcggcggcgagctcaagcgctggcagccgggtaaaggtctgtcggcgccgatagccggcgtgccgcaggtatgggccaacggccagggtggcctactggacgtggcgctggccccggatttcgcccagtcgcggcgggtgtggctgagctatgcggaaagcgacgccagcggtaaggcgggcaccgcggtgggctatgggcggttgagcgaggatgccacgcagctgacgaactttaccgtggtctttcgccagcagccgaagctctccgtcggcaatcattttggcggcaggctggtgttcgacggcaaaggatatttgtttatcgggctgggcgaaaataatcagcgcgccaccgcccaggatctcagcaagctgcaggggaaagtggtccgcctgacggagaccggaggtgtaccgccggataacccttttgtcggccgggctgacgccaggccggagatctgggcttacggcatccgtaatccgcagggcatggcgatgaatccctggagcgaggcgctgtggctgaacgagcatggcccgcgcggcggagatgaaattaatattccgcaggcggggaaaaattacggctggccgctggcgacgcacggtattaactacagcggcctgcccattccggaagcaaaaggcaaaacggttccggggaccgaacctcccctgtatgtctggccggtctctcccggggtgagcgggatggccttttattcggcgccgacctttccccagtggcagcataagctgtttatcggcgcgctgaaggagacatcgctgattgtcctggcggtggacggtaatcaggtccgcgaggaggggagattactggaggcgcgcggaaaacgcatccgcgatgttcgcgtgggacccgacggctatctgtacgttttaaccgacgagtctaacggcgagctattgcggttgagtcccgaggcttagcctcaggtcaccgggatctgcactacttcgcgccaggcaggacgttggctaatctgctgataccagcgctgcagatggggccgcggttgccagctgtcgtggatcgacaacagattgtagacgaagggagcgacggcaatatcgccaaggccgaactgctcgccggagagccacggcgttttggccagttcgtcatccagcatggcgaacagcgcttcgcaggcgctgatccccgcggcgatggccgccgggtcgcgctgctccggcggcgttctcaccaggcccattaataccgggcgatgggcgggagagagggtgccgttggaccaatccatccacttttccccttgcgcgcgctgcgccggcgcggcaagccacagacggtcaacgccatactgggccgccaggtagcgaataatcgtatttgattcccacactaccaccccggtggcatcgtcctttaacagcggcaccagcccgttcgggttcatcgccagatattccgggtcatgattgagaccaaactccagcccggcgaggatctgctgataaggcagatccagctcctccagcacccagcgtactttcttcacgttggtcgagttattacgtccccacagtgtaatcattttcgctcctgagtttgtttcactgccgttgcagcgcgatcggcgatcatgttgggataaagttaaaaatccggcaagcttttttatttggctgttattaaaggtttttatgcttactcccttcagccaggggcactcctgggttacagggcccggaaagtgtttttactattttacaggagtaatatctatagggtgttacgctacgaaggaaagggcgtgaatatggtgtatcttattgataattaaagctttaaatcatgcatgcatctataaaaacgctccctctccgtctcggttaaaatctcaatgtcgcctgagggtataatttgatgctgattatnnnnnnnnnnnnnnnnnnnnnnnnnnnnnnnnnnnnnnnnnatagaaagtcagtgaaagaattatatttttacagggatgaactgttgtttttatcgatcggatatacatctttttcatcccacccagaaaaaatagaccatgagaggcgccgactggctggaagatattctgaaaaatagcaaaaaaaacccagtgactggcactggggagtaaatttactcagggttgcatgctgttctcaagataatattcgagtctcgaagtatgggttaaccaaaggtaaccatcaacttccatacagactacatgggaaatatactgtattaaataaccaggaatccacccttacttttgtgctatttatcttacctgggtaattacggcgggggtaagtggtatataatgcaataatcagtatttgaatctatagcgttaaacgagcagagcctggtagaggactttactttccccggaaggatttgaaaaaggcggttaaaatgaatgactgataaggatggccagcatactatcgcggtgctatcaaaacatccctgcaaaacgaaatagggataaaagaagcactggcgaactgcagtctggaagagcgagtcgtagagctcgatatggcatcggacgagaagggtaggagattacccgggaagagatgttaaccttttcatcaaaccggcgtgattaataacgggcaacagaatcagagcggcccggggttttgagagcaatacttctgtaaaggccacggctgtggatgcgctgttatgaatgtatttgtaaaatttatcaccatccagagtcgccttgaaaaaaaaagcccagcgacaggctggggtgtaattacacgcataaagggatatgccattttcaacacaatatgcgaatcttaatttatggaataactgcgggtgagctacccgcttccataaagattgcaggggaaactatactgtatttaatgaccaggaatccatccttatcgatgtgctatttttcttacttgtgtaatacggaaagggaaaatagcccgataaactatcttttaccgatatgccgactaaaacaggaaagccgtctgcctgcttatccagtgggcgaataattcatatcattagcgggaggctctcccttcctgacctcaattcctgatggtggcgtatagaggggatagctgattgatatcctttatcaaggagattgcgcctccatcggcggaatgctatggcaatcgaagccctgctgaacatggcgatcaggcaggcccgatggagagaaaagtgcgggcgttgttgctaatttcctgagacgggcgtaatgaccgtctcaagcatagcccgggagttctcaactgcatttcaggcgtaaatacggcctacagaaccttcaggtttatatttaagcgtctgagacttctacagcagcaagccagatgtggttattgtgagttcggaagttgaactgggcctcatggaatgcaaccgggccgacattttgagttttgtgaagggtatcagcagtaacaaccatccccggttctcaggtgaagggggtaggggcgacgcgactggatatcactggccaggctttcgcttaccccacacggccccgccataatgtgaatctatgaccaggcaaaccacaatgaaagacacgcttgcgacgtctctttagtagcattttccccgaagagaagtgagctatgtcattgaaatttcggtgactaattggttttgaaaggcgatttttttcttgccataataaagttaacattaaggcgattacgatcaaaaaaattgttctgattaaagcacagcggcatgttattgcgtaaactttaaaaactttaccaactcgctgtttctttaaggtcatttgtacgctttactcaccggttgctgcggcgcggtcagagtggcgcggcatattttgtttggaaaggatacttgggtggctcttatgatgcatgacgctttttcccttcgcggcctcgcggcaggttgcgcgctgttatttcttgtcgcacctgcggtgcaggctgcggaacaactccccgacgccccttcaattgacgctcgcgcctggatcctgatggactatgccagcgggaaggtgctcagcgaaggcaatgccgatgaaaaactcgacccggccagtctgacgaagatcatgaccagctacgtggtagggcaggcaataaaagcgggaaaaatcaaactgaccgatatggtgaccgttgggcgcgatgcctgggcgaccggcaacccggcgctgcgcggctcatcggtgatgttcctcaagcctggcatgcaggtttccgtagaagatctgaacaaaggggtcatcattcagtccggtaacgacgccagcattgcgattgctgactacgtagcgggcagccaggacgctttcgttagcctgatgaacggctacgccaaaaaaatggggctgaccaacaccacctttatgaccgtccacggccttgacgcgccggggcagttcagcaccgcccgcgatatggcgctgctgaccaaagcgatgatccacgacgtaccggaagagtatgcggtacataaagagaaagagttcactttcaataaaattcgccagccgaaccgcaaccgcctgctgtggagcagcaacctcaacgccgatggcgtgaaaaccgggaccaccgccggggccggctataacctcgtctcctcggccactcagggtgatatgcgtttgatcgccgtggtgctggggaccaaaaccgaccgcattcgctttaacgagtcagaaaaactgctgacctggggcttccgcttctttgaaaccgtgacgccgattaaaccagatgccaccttcgttacccagcgcgtgtggtttggcgatagcaatgaagcgaaactgggggctggcgaggcgggctctatcactttgccgaagggccagctgaaaaacctgaaagccagctataccttaaatcagccgcagcttaccgcgccgctggagaaggggcaggtggtcgggactatcgactttaagctaaatgataaaaccattgaacagcgtccgctgattgtcatggagtcggtaaaagagggcggcttcttcagccggatgatcgacttcgtgctgatgaaactgcacggctggttcggcagctggttctcctgatgcctgcccgcgccctgcggggcgcgggcagcgacgcttcaatacagtagggaaatctgctgcgccttcgccagcgcgaccagctcatcatccgggcagatatcgctggcaatcacgtcaaatttcgctaacgcccccatgcgcgccggacgcactttgccaaacttgctgtggtcgaccaccagcacgtgatagcgcgcgtgacgcatcgcccagtgcttaaccggcagctcttccaggttatagcaggtcgccccctgctcgcagtcgatccccgccgccgagtaaaaggcgatatcagggctcagatggctgagggtatcctcaaggctcagcggcataaaaatcgcgttgctggcatgaaactccccaccgcacaggaccgcgcggcactggggtttttcctgcagggccagaaaggtgttcagggagtagcagacgccggtgaagggcagggcatcgtcaatggcgtcaataatccacggcgtggtggtcccgcagtcgaagaaggccatctgatgggcctccagcagcgcggccgcatggcgagcggcacggcgtttttcctcaaccagccgggttttttgatcgctgagcaggtaatgggtggcgctgcgcggctccagcacaatgtatccgccgagcagcacaaccgggccgctgtggccattgaggtcgcgacgaatggtcatttccgacaccccaagcagggaagcggcttctttcagatgcagcttatcgctgcgtttaagtgcctgaatgagctgactgatacgttcgtcacggcgagtttccatattccctctgcgctaaaatcgccctgcgggggcagggcgttagcgggattttacctgtcgcttgcgggttagtcacgcggtggccgcagcgacggcggcgtttagccgcgcacccaacctttgcggattggcaaggagaagcagagacgatacagccgctgcagctgatggtatagcgccgggccgaacgtatgccagatcagcgccgcgccaaggcagccgcacatcccggccagcagcccgccgaccatatccagcggccagtgcacgccgagatagacacgggaccaggcgatggcggcggcaatggccatcagcagggcgccggaccacaggcgatgccagaacaggaaggccagggcaaaggtaaagctgacggtgccatggtcgctggggaaggagtcgtccgccgcgtggtgcaggaagttatagcctacgccggcgacaaacggccgatcgtgcggataaagatggccgatcgtccacgacacggtcaggctgatcgtcagcgccagcatcagcttaaacaccatctgccgctgggcaggcccccacagccacaatgtcaccaccagcagaggtacgatcagaatcagatctttagcgatgaagatcgccatctcaatggcccactgcggcgaggcaggcgtcgcgttgagcagggcgaacagcgcatagttaatattttccagcatagacttccaggctcgttggtccgatagcaattaagccgcctaccctaaataaaagcggtgcggagataaaggcggcattgtcttaaagatcaggttgttatgaaatccactaccataaagtctacggctaacagcctgaaaaacgtcagtatatcgtttgtcacattgctgaaacataaacggaatatatacacaggctgaataacaggggagaggcaggacgatggcgcacggctcgtaatattgtgcggtgtcacccacaattcactatctccgcgccgggagtttcattacactttgcgcgatttttgatagataagagatttcatgcaaaattattcgctttcaggccgccgcctcggaaggcaggcgctgttgttcccgttatgtctggtgctgtacgagttttccacttatatcggcaacgatatgattcagccgggcatgttagccgtggtgcaggaatttcaggtgggcaacgaatgggtacctacctcaatgactgcctatctggcaggcggcatgtttttacagtggctgctggggccgctgtcggatcgtattggccgccgtccggtgatgttgaccggcgtagtatggttcatcgtcacctgcctggcgacgctgctggcgcagaccattgagcagtttaccctgctgcgcttcctgcaggggatcagcctgtgctttattggcgcggtgggctatgcggcgatacaggagtcctttgaggaggcggtgtgtatcaaaatcaccgccctgatggctaacgtggcgctgattgccccgctgctggggccgctggtgggcgccgcctgggtgcatgtcctgccgtgggagatgatgtttgtcctgttcgccgtgctggcggccatctcgttcttcggcctgcagcgggcgatgccggagaccgcgacgcggctgggcgaaaagctgtcggtgaaagagctgggccgcgactatcggctggtgctgaagaacctgcgcttcgtcgccggcgcgctggccaccggctttgtcagcctgccgctgctggcgtggattgcccagtcgccggtgattattatcagcggcgaacaggccaccagctatgagtacggcatgctgcaggtgccgattttcggggcgctgattgccggcaacctggtgctggcgcgcctgactgcgcgccggaccgtgcgctcgctgattatcatgggcggttggccgatcatgtttggcctgatcctctctgcggcggcgaccgtggtctcttcccacgcttatctgtggatgacggccggtctgagcttctacgccttcgggattggcctcgcgaacgccggcctggtgcgtttaaccctgttcgccagcgagatgagtaaaggcacggtctcggcggcgatgggaatgctgcagatgctgatcttcaccgtcggcatcgagctcagcaaacatgcttacgagctgggcggcaacgggctgttcagcctgtttaacctgctgggtggggtactatggctggggctgatgatttactttctgaaagataaaagcgtcggcaattcgcagcaggggtagttgttttcaacccggatgcgctcgcatccgggtcttatcaggcgaacggcgcttcgcgatccaacaccttatcaataatctgcaggacaccttcttcgttgttatgcggcgcctgatagcgggcgacggctttgacgtcttcccgggcgttggccatggcaaagccaaacccggcgtgctgcagcatttcgatatcgttgccgctgtcgccgaacgccaccacctcgtgatcctcaatgccccagcgctgctgcaaaatgcgcagcccgttggctttgtgcacacccgggataattaagtcgatgctgccgtagccggtggccaccgcggtgaccatgtcccccagcgtcgcgtgcagcttcggctgaatttccgggatcaggctgtctggcacgttgagaccaaatttgaggatggtgtcatcgagatggttaaaatcatccaccagttctaggcggtgataatacttcgccgccaccgtcttcagcgcgtcgttgtagcgattgagggtgtaggcgctgcgcttcccgcaggcgatgatttcgatattcggcaacgtctgcagatggtcgaccacggcgttgaagtggtgaaccggcagttggcagttgaagacgtcttcattgccgctcaccacccagccgccgttttccgccacgaaggcgatctgatgggcgatctccgggaaaaaggagatcagctgataatattggttgccgctggcgaccacgaagcgaatattctgttcgcgcattcgctggtactgggcgaggaagcgcggccggttataagttttggcatcgcttaaaaaggtgccgtccatatccaccgcaatcagtttgatgctcattagctgttctccataacgggttcagattgtggcttagccaccgcgcgggcgaccagcgccgccgccatcaccagacccagcaccaccatcatggcgctgcgcaggccgaagtgttcgccgaggaaacccagcagcggcggcccgacgaggaaagcgagatagccggtgatcgccaccacgctgacgcgcttgggcgcgtccggcccggtatcgctggcggcggagatggtcagcgggaagccgagcgaggcgccaatgccccacagcagcaccgagatgcccgccacccaggggttatcgacgaagatgatcaggcctatgccgagggcgcccatcactgcgctgccgcggaccaccgccacccggctgtagcgatcgataaaccagccgccggtaaagcggcccagcgtcatgccgagggtgaaaccggcataaatcagggagccggaggtggggctaaagccgtggccatccaccatcagcagcggcagccagtcgttggccgagccttcggcaaaggccatcgccaggacaatgacgccgatcagcagcagctgcgcgtcgcgccacaccggcagacctttcgcctcaccgtgggcgacttcggcggcatttttaccggtgccgtcgggaatggcgcggatagcaatggcgatgggcaggatagccaccagcgcagccgccaggatgtgcggggcggccggcagaccgaatccggtcactgccatgcccaccccggcgccgaacagggtgccaaagctgtagaagccatgcatcatcggcagcaccgttttattcatctcccgctcgatggccgcgccttcgacgttaatagcgacctctgcggagccgaagctggcgccgaagatagccagaccgaaggcgaacagcggggcggaagtgacccacagcgccaggctgagcaccagcatgccaagcacggcgaaggacatggtggtgcggatgaccttgcgggtaccaaagcgcttcaccagccacgccgagcagagaataccgctcattgaccccaccgacagaccaaacagcaccacgcccatctctgcggtggatagcgccaacagatcgcggatcgccggcgtgcgggtggcccaggaggccattaacaagccggggatgaaaaagaacataaacagcgcccatagccgaagctgcagcgctctgcgcgaggattgcgtcgtcatccgtaaacgccttaaaggagaagagtgaagacaacagtagcaagtaagtgtacatttgtacataaaccggaagaggaaaatcatggcccgtagaccaaacgatccgcagcgccgcgagcgcatcctgcaggcgacgctggataccatcgcggcgcatggcatccatgcggtgacgcaccgtaaaatcgccacctgcgcgaatgtgccgctgggatcgctgacctactatttcagcggcattgaggcgttaattgaggaggcgttcagcctgtttaccgccgagatgtcggcgcagtatcagcaaggcttcgtcggggtaacgaaccgggaacaagcctgcgatgccatcgcggatctgatcttcagcgcccaggtgaccacggcgcgcaatatggagctgatgtaccagctgtacgcgttctgcagcagtcagccggcgctgaaggcggtgatgcagaactggatgcggcgcagccagcagacgttggagcagtggttcgcccccgataccgcccgcggtctcgacgcctttattgaagggatgaccttgcactttgtcaccgaccgcgcgccgctgtcgaaggcggcaatccgcatgatggtcgggcagctggcgggggagagggcgcaggaagaggggcgctgaagcggcgtttcacccggaatggctaaacgcaggcaacaaaaaacccatcaaccttgaaccgaagtggcggggttgatgggctccacaaaatggggacatcaaagaaaagcagtggcattacttatgactgatgccctgagaaaaagttctgcctgtgacggcttttttctcaaaaaattattgtagccctggccagatgatcacgatgagcgtcccggcaagggtaagcagcacgttggcgatggcgtaggtccctgcgtagccgagcgctggaatattgctgcgcgcggtatcgctgatgatctccatcgccggggcgcaggtgcgggctcccatcatggcgccgaacagcatcgcccggttcatgcgcagcacgtaggcgccgaacaggaagcagatcaccaccggcaccaggctgacgataagccctgccgccagcatctggccgccgacggcgcccagcccgttattgatcccggccccggcgctgagaccgaccccggccataaacaccatcagaccaaactctttcaccatgttcagcgccccctgcgggatatagccgaaggttgggtggttggcgcgcaggaagccaagcatgatgccggcgaacagcaggccggcggcgttgccgatgccgaagctgaaggagctgaactggaaggtgatcatgccgatcatcaggccaacgataaagaaggcgcagaaggccagcagatcggtcacctggctgtgaatggagataaagccgatgcggtcggccacggtttttacgcggcgggcgtcgccgctgacctgcagcacgtcgcctttgttcagtacgacgttatcgtcgataggcatctcgatctggctgcgaataacccggtttaagaagcagccgtggtcggtaagcttgagttgcgccaggcggcggccgacggcgttgtggtttttgaccacaatctcttcagtgacgatgcgcatgtcgagcagatcgcggtcgaacacctctttaccgttgcggaagctcgggtcgaggcgggcgtgggcgtccgggtaacccaccagcgcaatatcgtcacccatctgcagcaccgcgtcgccgtccgggttggccagaatgccgttgcgacgaatgcgttcaatatagcagccggtctggcggtaaatacccagttcgcgcagatttttgccatccgcccaggccaccagctccgggccgacgcggtaggcgcggatcaccggcaggtagactttacgtttggaatcggtatcgaggccgcgctcgcgggcgatttgctgggcgctggtctgcagatcctgatgctgcagcttgggcatatagcgggcgccgacgatcaggctcaccagaccaaccagataggtcagggcatagccgaggctcagatggtcaagcgactgcgccagctgatcgctgggcaggccgaaatggcgcagggtgtcgcccgcgcccaccagcaccggggtggaggtcatggcgcctgccagcataccggcggtgagcccgatatcccagccgaacactttacccagcaccatggcgatcagcatcgcgctgccgaccatcaccagcgccagcatcaggtagtttttcccgtcgcggaaaaaaatagaaaaaaagttgggcccggcttctacgccaacgcaaaaaataaacagcataaagccgagattaagggcatcggtgttaatcgcgaaatgctgctggcctaataatagagaaacgactaaaacgccaatggaattaccaagttgtactgagccgagacgcagttttcccaggcatagtcctaatgcaagtacaacgaataataacaggatgtaattcccgtttaacaaatctgcgacgtttatattcacgaaagccaacttctcatttactagtaagttgttgaaggaaatggttatttggtctaaggttgctcaggcgttcgcgttgtcgcgaacctattctggcaccctgttataaccagcaaaaatataccgctagtttaatccttcctggatgcggcggctagtgacaatcgtttttaggctggtaggggagttattggcatggattgccgaaatgctttatctgactgggcgacgtggacgtgagttagaggcaacatcaggaggatacggtgaaatctgagcgtagttgggccggcattatctgtggcttcgttctgttcattgtggtgtgcttatcgttgttgttacatatgaaaggggcatttcgcgccagcggcaacccggagctgggcctgctcttctttttgctgccaggggcggcggcgagctgtctctctcccggacggcgggtgctgcgtcctttgctcggcgcgatactggcggcgccggtctgcatggtgacgatgcggctgttcttcgtgacccaccggacgttctggcaggaaatggcgtgggtgttgagcgccgtgttctggtgcgcgcttggggcattgtgctttttgtttatctgcgcctggcttgatacctggcgcagtcattcatcgagcaaataaattgactcaggcaaacaggccgagattctcttttgcccaggcttcaaaatcggtgcagccgccgatgtgtttctggtcgacgaaaatctgcggcacggtttcaaccggtttgccaacggttttttccaggtcagctttgctgatgccttcggcatgaatatccacgtagcggtagttgaaatcatcacgctcgttggtcagtttttctgccagttctttagcgcgaacgcagtaagggcagcctggacgaccaaaaataacggtaaacattgcttctctccttaaacctcagccggatggcgaatggcgcttatgatgcctgcaacgggcggggagggaaagaaggttctgccttttacttcgatggtttacggctatgtttgataaatgtcggactgtcaaaacacgtatactggcccgacggcgcggtggaattggctggcgcgccgcgtttatcaaccggagaggcgtgatgcgaaaatttgccccattgccgaaaagcatactgctggttgagctcctcgggatggggctgttaaccctcgcctggctctcccttaaccagtatgtccagctgcctgcgcccattgccagcccgaccgcggcgctggtgatgctctttgccgggatcgtgctgatgatccccgccgccatcgtcgtgatgtggcggatggcgcagatcgtggccccgcagttaacgcactctccaaagcctgaatccttgtctgacagagaaaaacgaaatgacgccgaccattgagctgctgcgcagccaccgttctatccgccacttcaccgatgcccccgtgagcgacgaacagcgcgcagagattatcgccagcgcgcaagcggcatctacctcgagttttttacagtgcacctccatcatccgtattactgacccggcgctgcgtgaacgtctggtcccgctgaccggcggccagcagcacgtcgcccaggcagcggagttttgggtcttctgcgctgactttaaccgccatctgcagatctgcccacaggcgcagctggggctggcggaacagctgctgatcggcgttgtcgatacggcgctgctggcgcaaaacgcgctgaccgccgccgagtccctcgggctagggggcgtctatatcggcgggttgcgcaacagcattgaggccgtcacagagctgctggagctgccgcagcacgtcctgccgctgttcggtctttgccttggctggccggcggataacccggatatcaagccgcggatgccggcggccatgctggtgcatgagaaccgctatcagccgctggataacgcgctgctggcggagtatgacgaacagctggcgcactattatctgtcgcgcggcagcaacgcccgccgcgatacctggagcgaccatatccggcgcactatcgtgaaagagagtcgtccgtttattcttgactatctgcataagcaggggtgggcaacgcgctgattacgtgtacactgctgctccggccaggtgatatccgccgccggccgcaggaaaggtgaaagtgtgttcgatagctgaggcccgccagagcgggtcttttcgcagaggtgcaggatgaaaattgccatattatcccgggatggaacgctttattcatgtcggcgcctgcgcgaagcagcgcaacagcgcggtcatcagatcgagatcctcgatccgctttcctgttatatgaacgtcagcccggtggcctcgtcgatccactacaaagggcgtcagctgccgcactttgatgcggtgatcccgcgcattggctcggcgatcacctactatggcaccgcggccctgcgccagtttgagctcctgggaagctatccgctgaacgaatcggtcgctattacccgcgctcgcgataagctgcgctcgctgcagctgctggcgcgccagggcatcgatctgccattgaccggcatcgctcactctccggatgacaccagcgatctgatcgccatggtgggcggcgcgccgctggtggtgaagctggtggagggcacccaggggatcggcgtggtgctggcggagacccgccaggcggcggagagcgtgatcgacgcctttcgcggactgaacgctcatattctggtgcaggaatacattgccgaagcgaaagggtgcgatatccgctgcctggtggtcggcaatgaggtggtggcggcgatcgagcggcgggcgaaagagggggatttccgctctaacctgcaccgcggcggcatggccacggtggcgcagattagcgacgaggagcgggccattgccatcaaggcaacgcaaactctcgggctggacgccgccggtgtcgatattttacgcgccgcccgcgggccgctggtgatggaggtgaatgcctcgccggggctggaaggggtggaaaccaccaccggcgtggatgtcgccggcaagatgatcgcctggatcgagcgccaggcgacgccggaattctgtttgaaaataggcggctaaccgccggatgcaagacggccatggtatgcggcgctttttttgcgtaagctatggcgtcgtttttccactgtaagaggtcacaggcactatggattcactggtcgttccaggtctggatacgctacgtcgctggctggacgaaatcggcatcagcttttttgagtgcgattcctgtcaggcattgcacctgccgcatatgcagaatttcgacggtatttttgatgccaaaattgacctggtggacaacgtggtgctcttttccgccctggcggaggtgaagccgtctgccctgctggcgctgtcggcggatctctcggccatcaacgccagctcgttaaccgtgaaggcgtttatcgacattcaggacgataatttgcccaagctggtggtttgccagtcgctgtctatcggcccaggggtgaccatggagcagttcgcctggttcttccgccaaagcgaagagcagatctcgatggtaatcctcgaagccggcgcaaatcagctgctgtacaaaggcgaagaagaagagcctgcggcggaaaacgtgcaataccattttcttcactaaacctgcctaaaattagcgcagccactaccgcagcggctgcgtattacccgcttttattctgcatttaacctttctttaaagcattattcaccgccattcaggccgttttggcttatcacgtagaccgttattgcataaaaatttgataaaaggcgtttttttacctgggctatagcctcttattctggctacagttattctggcgatgcttccagttgcgagcaaccactccgggagagatccgctctccttttctcaggcaatgaaaaaatatgcatgatttttgcatgcgtagaaatgcgtatatttgagcccgtaagttaacgggcgttgagaaggaaaagagatatgaccgcctttggtaaaaaatggttaacaggtctggttacgggtgcgctgatggccgtctctgccggttcgctcgccgccgaacaaaaaaccctgcatgtttataactggtctgattatatcgcgccggacacggtagcgaatttcgaaaaagagaccgggattaaagtggtgtatgacgtttttgattccaacgaagtgctggaaggcaaattaatggcgggtagcaccggtttcgacctggtggtgccgtcggcaagcttcctcgaacgccagctggcggcgggcgtgttccagccgctggataaaagtaagctgcccaactggaagaaccttgaccccgaagtgctgaagctggtcgccaagcatgacccggagaataaatacgccatgccttacctgtgggcgacgacgggcattggctacaacgtggataaggtgaaagccgttctcggcaaagatgcgccggtggacagctgggatctggtgctgaagccggagaacctcgaaaaactgaaaagctgcggcgtctccttcctcgacgcgccggaagagattttcgccaccgtgctgaactacctcggcaaagatccgaacagcagcaaagcggatgattacaccggcccggcgaccgatctgctgctgaagctgcggccgaacattcgctacttccactcttcgcaatatattaacgaccttgccaatggcgacatctgcgtggcgatcggctgggcaggggacgtctggcaggcggccaaccgcgcgaaagaggcgaagaacggcgtcaatgtctcctactttattccgaaggaaggcgcgctggcgttctttgacgtctttgccatgccggccgacgcgaagaataaagatgaagcctatcagttccttaactatctgatgcgtccggacgtcatcgccaaaatcagcgaccaggtgttctacgccaacggcaacaaggcttccacgccgctggtcagcgagactatccgtaacaacccggcgatttatccgccagcggatgtgttcgccaaactgttcacgctgaaggtgcaggatccgaagatagaccgcgtgcgcacccgcgcgtggaccaaagtgaagagcggcaaataattcctgacggcccgtcgaatacgggccaaatcagatctgcactcgccgggaaatagcagcgcgcccggcgagcagaagcaccaggatggtgcaaatgcactgttaagcacgaagtatggcaccggaccatatggtgatcgtttttttgccggagagcacccgattgaacgacgtaatgccccgcccacaggcgaaagcccccaaagcgctgaccccgctactggaaatccgtaacttaaccaagtcgtttgatggccagcatgcggtcgacgacgtcagtctcactatctacaaaggcgaaatttttgctctgctgggcgcgtcaggctgcgggaaatcgacgctgctacgcatgctggcgggctttgaacaaccgaccgccgggcagattatgctcgacggcgtggatctggcgcgcgtgccgccctatcagcggcctattaatatgatgttccagtcctatgccctgtttccccatatgaccgttgagcagaatattgccttcggcctgaagcaggaccgcctgcctaaggcggaaatcaccgcccgggtgcaggagatgctggccctggtacatatgcaggagtttgccaaacgtaagccgcaccaactctcaggcggccagcggcagcgcgtcgcgttggcgcgcagcctggcgaaacggcccaagctgctgctgcttgatgaaccgatgggggcgctggataaaaagctgcgcgatcgcatgcagctcgaggtggtggatattcttgagcgcgttggcgtgacctgcgtgatggtgacccacgatcaggaagaggcgatgaccatggcgggccgtatcgccatcatgaatcgcggcaagtttgtgcagattggcgaaccggaagagatttacgagcaccctaccacccgctacagcgccgagtttatcggctcggtgaacgtctttgaagggctggtgaaggagcgtctggaagacggtctggtgctaagctcgccgggactgatgcatccgctgaaggtcgaccccgacgcctcggtggtggacaacgtgccggtctgggtggcgctgcgtccggagaagatcatgctgtgcgatgaaccgccggcggacggctacaattttgccgtcggcgaggtgattcatatcgcctatctgggggatctctctatctatcatgtgcgcctgcaaagcgggcagatgatcagcgcccagctgcagaatgaacaccgccatcggaaagggacgcccacctggggcgatgaggtgcgtttatgctgggatgctgacagctgcgttgtgctgacggtgtgaggagagggcgatgaataccgttgaatccccgtcaggggcgaaaaaaccgggcggcttcgcgctgtgggcggcgcgcctgcagatggcgcatggccgcaagctggtgattgcgctgccctatctgtggctgatcctgttgtttatgctaccgttcctgatcgtgttcaagataagtcttgccgagatggcgcgggcgatccctccctacaccgagctgatggagtgggcggacggccagctgacgctgacgcttaactttgccaacttcctacagttgactgacgatccgctctattttgaagcttatctccagtcgctgcaggtggcgggtatctcgacgatctgctgcctgctgctgggctatccgctggcctgggcggtggcgcacagcaagccgtcgacgcgtaatattctgctgctgttggtgatcctcccgtcgtggacctcgtttttgatccgcgtctatgcctggatggggctgctgaagagcaacggggtgttgaataacttcctgctgtggttaggggttatcgatcagccgctggagatcctgcacaccaacctggcggtgtacatcggtatcgtgtatgcctatctgccgtttatggtgctgcctatctacaccgcgctgacccgcatcgactattcgctggtggaggcctcgctggatctcggcgcccggccgctgaagaccttcttccaggtgatcgtcccgctcaccaaaggcggcattatcgccggctccatgctggtgtttatcccggcggtcggcgagttcgtgatcccggaactgctgggcgggccggacagcatcatgattggccgcgtgctgtggcaggagttctttaacaaccgcgactggccggtcgcctcggcggtggcgattgtcatgctgctgttgctgatcgtgccgatcatgtggttccacaagcaccagcaaaaacagatgggagagcagggatgaacgacttgccggtagtacgctcgccgtggcgcattctgatcctcgtgctcgggttcaccttcctctacgccccgatgctgatgctggtgatctactcgttcaacagctcgaagctggtaacggtctgggccggatggtcgacgcgctggtatagcgaactgttccacgatgatgcgatgatgagcgcggtaggattgagcctgaccatcgccgcctgcgcggcgacggcggcggcgatcctcggtaccatcgccgcggtggtgatggtgcgctttgggcgttttcgcggctccaacggcttcgcgtttatgatcaccgcgccgctggtcatgccggacgtgatcaccggtctctcgctgctgctgctgttcgtggcgctgggacatgccatcggctggccgtcggaccgcggcatgttgaccatctggctggcgcatgtcaccttctgtaccgcctacgtggcggtggtgatctcctcgcgcctgcgcgagctggaccactccattgaagaggcggcgatggatcttggcgccgcgccgctgaaggtcttcttcgtcatcacgctgccgatgattatgccggcggtgatctccggctggctgctggccttcacgctgtcgctggatgacctggtgatcgccagctttgtctccggtcccggggccacgaccttgccgatgctggtcttctccagcgtgcgcatgggggtcaacccggagatcaacgccctggcgacgctcatcctcggcgtggtcggtattgttggttttatcgcctggtatttgatggcccgcgcagaaaagcagcgagtgcgcgatatccagcgtgcaagacaaggctgaaccacctaaaatcggtacagcagcctccggtcggcgccaccctgtggcgccgttttcatggaagacattacgttgggattgtttacgaaaactcgctcatcgcatgcccgccttaacgtccctgcgctggtgcaggtggcggcctttgctattattttgattcgtggcctggatctgctgatgatccttaatctgttgggcctgcaggggctgaacgaattcatacaccgcagcgttcagacctggaacctgacgctggtcttcctcggcagcctggcgctggtgtttatcgaaatctggtgcgccttctcgctggtgaaagggcgcaactgggcgcgctggatctatctgctgacgcagattatcgctgccggctacctgtgggcggcgtcgctgggctacgggtatccggagctgttcagcattcccggggaatcaaaacgagaaattttccactcgctggtgatgcaaaaactgccggatctgctggttctgacgctgctgttcgtgccggcgaactgccgtcgctttttccgcctgcaataacggtgatacaatccccgcccctggatttttgaaggtcaattatgcattgcgcactctacgacgccggccgctgccgctcctgtcaatggctggagcggccggtcccgcaacagctcgccgataaaatggccgatctgcgcacgctgctggcggcgatcccggtcgcagcctggggcgagccggtcagcgggccggaggcggctttccgtaacaaggctaaaatggtggtcagcggcagcgttgagcgtccgctgctggggatgctgcaccgcgatggcactccggtggacctcaccgactgcccgctctatcccgccgagtttgccccggtttttgctaccctgaagccctttatcgcccgcgccgggttaacaccttacaacgtcgcgcgcaaacgcggggagctgaaatacctgctgctgaccgccagccagcagggggagatgatgctgcgcttcgtgctgcgctcagaggccaaggtggctcagctgcgcgccgcgctgccgtggctacaggcacagctgccgcagctcagcgtgatcacggcgaatatccagccggtgcatatggcaatcatggaaggtgagcaggagatcttcttcaccgaacagcaggcgctgggggaggtctttaatggggtgccgctgtggatccgcccgcaaagcttctttcagaccaatccggcggtagccagccggctgtacgccacggcccgcgactgggtgcgcgcgctgccggtccagcatatgtgggatctgttttgcggcgttgggggatttggcctgcactgcgcgacgccgacgatgcgcctgaccggtatcgagatcgccccggaagccatcgcctgcgccagacagtcagccgcgcagctggggctcagcaatctgcattttcaggcgctggactccacgcagttcgccactcacgaagcggatgccccgcagctggtgctggttaacccgccgcgccgcggtattggcgctgaactatgcgactatttaagccgcatggcgccgccctatattatctattccagctgtaacgcccgcaccatggcgaccgatatcgctcgtcttagcggctatcgcgttgagcgggtccagctgtttgatatgttccctcacaccgcccactacgaagtgctgaccctgctggtccgcgaagtttaaacaaaatgtgaaggctttgcgccgctgaaatcgggtaagcttgaggcagcatgttttgttattggtggggggaatctaatggccaaaaccattctgctggtggaagatgacgaggatatagccacgctgctgcggctcaatcttcaggatgagggctatcagatcgtccatgaagccgacggcggccaggccctcgcccggctggagacgcaggtctgggatgcggtgatcctcgatttgatgctgcccggcgtcgatggtctggagatctgccggcgtatccgccagatgacccgctacctgccggtgattatcatcagcgctcgcaccagtgaaatgcaccgcgtgctgggcctggagatgggcgccgacgactatctggcgaagcccttttcactgctggagcttatcgcccgcgtcaaagcgctgtttcgtcgccaggaggcgatggggcagaatctgctgatggacgccgggcgcctgtcctgccatggcctgagcatcgacccgctgtcgcgcgaagtgaagctgcgcggcgagacggtggacctcacgccgcgtgaattcgacctgctgtattacttcgcccgccaccccggggaagtgttttcccgcctggcgctgctggagcaggtctggggatatcagcacgagggctatgagcataccgtcaatacccatatcaaccgcctgcgcagtaaaatcgaacgtgacccggccgagccggacatcattcttaccgtctggggaaaaggctataagttcgccccggtgacgcaagaggccgtcccgtgatccgccgcctgagcctcagccagcggctggcgctggtggtggtttccctgctgatgctatgcgcggtggcggtatgcgccgtccagttacacagcagcgcgcagtatggcaacgccatggtgcagcgtctgtcgtccgggctggctcaacagattgtcgcccgcgagccgttgctggacgcccacggcgaggtcaaccggcaaaccctgaagtcgctgtttgaccgactgatgacctttaatcccagcgtggagctctatctgctgtcgccggatggcgatctgctggccgatgcggcgccgccgggccatatccagcgccagcgtatcgacatggcgccggtgcaggcttttctcaccggcagtgcgtcgccggtgtatggcgacgatccgcgcagtcccgacggacgaaaagtcttcagcgccgccccgctgcgcgtcgacggccaactgcgcggctacctgtatatcattttgcagggggagacgtttaatcagctggcggccgacgcctggcaaaaaacgctgtggagcattgttctgtggacgctgctgctggtggccctgtttggcctgctggcaggggggctggcatggttctgggtcacccggccggtccgcctgctcaccgcccaggtggcggcgagcggccaggacagcatcagcgccatcaaaaccctggcggcccgcaggccggagccccggcctggtaacgaggtggcggtgctcgagaaccgctttattgaccttgcccggcagattgccgatcagtgggatcggctggccgacagcgatcgccagcgccgtgaatttgtggccaatatctctcacgatttgcgcacgccgctgacttcgctgctggggtatctggaaacgctgaccctgaaggatgaatggctgaccgccgaggagcgcaggcagtatctcaccatcgccctgcgccaggggaacaaagtgcgccatctctcgcagcagctgtttgagctggcgcgactggagcatggaggcattaagccgcagcgcgagcgtttcgcgatgggggagctgatttccgacgtggcgcagaagtttgaattaactgcccgcacgcgcgaggtgaacctgcatattgatgtaccgggaccgctgccgctgattaacgccgatgtgtcgatgattgagagggtggtgaccaacctgcttgataacgcgatgcggcatactcccgtcggcggggagatccgtctggcggtctggcaggagaatcaacagcttcaggtcgaagtggcagacaacggagcgggcgtcgatgccgcgctgcgcgacgatctgttccagcggccgtcggcgttgtctacccaggcatcgcgggaggagcgcggcgggttagggttgctgattgtgaaacgaatgctggagctgcacgggggcgatatcagactggtggagtcggtaagcggggcgcggttcaggttcttcgtgccactttgagaaatcgccgggtgacggctacgccttacccggccatcgtggaagagcggtggccgggtaagcgcagcgccacccggcgaaaaaagttactccgggaaccactggttgctaattttctggtaggtaccgtcggccttaatcgctttcagcgcggcgttcagtttctccagcagcgccttgttatccgggcgcacggcaatgccgagtccggtgccgaagtattgcgggtcggtcactttcggcgtggctgcccccagctgcgggttagttttcagccattcgttgaccaccgcggtgtcgccgaacacgccgtcgatacggccatttttcaaatcgataatcgcattctggtagctgtcataggcgacggtcttcacctcaggatgcttatcctgcagatatttctggtgggtggtgccgttttccatgccgatccgtttgcctttcaggtcatcgaaagaatggaacgcatcttttttggcgatcaccagcgccgagttggcgtagtacgggtcggtgaaggccacctgcttgctccgctccggcgtaatatccattccggaaatcaccgcatcatatttcttgaacttcagcgccgggatcaggctgtcaaacgcgtggttggtaaaggtacattctgcctgcatttgtttgcacagcgcgtgggccagatcgatatcaaagccgacaatctggttatttgcgtccatcgattcaaacggcggataggttgcggagacgccaaagctgattttttccgcggcagcggcgccgaacgcgaaagaggtgagcagtgcagccagaactaactttttcatcgtggaactcccgtctgtctatcttatgattattcaccgtgtctgcggcatagagtgacaatgccatgaaatgaatttatatgcaattaaaatgattaagtatttctatcgtcataaaaaaagacggacaggtgtttgacttgtccgccttgctgtttgctttttatgcaatatgctcaggtgctagctacgtcgctcgaaggccagcgctttgcgttccaccaggcgcatcagcagcgtcagcagtccattaacgatgagatagataatcccggcggcgccgaacaccatcacgtcgtaggtgcgtccatacagcagctggccgtggcccatcacttccatcagcgtgatggtgtaggccagagaggtactcttgaaaaccagcaccacttcgttggaataggacgatagcgcacgcttaaaggcgtacggcagcaggatcgccagtgtatcctttttattcatccccagcgcgctgcaggactgccattgcccgtcggggatcgcccggatggcgccataaaacagctgagtggtgtaggcggcgctgttgagcgacagagcgatcagggcgcacagccacggctcggagataagatgccacagccacggatactcctgcagcgaagggaactgtcccgggccgtagtagatcaggaagatctgcaccagcagcggcgtaccggtaaacaaggtgatatagccgcgcactatccataccagccccggcgtcttcagggtcaggataatggtgaagatcagcgacaggatcagcgccacgataatcgacgccacggtcagcgtcaggctggtatgcagtcctttcagcagttcgggtaaatagtcgagcatcagcctggtctccgttcgaagcgcgtcgcacgctggtcaatccgcttaaggatgtattgactcaacagggtgatgacgagatagattgccgccgcaatgatataccagttaaagggttcctgagtgcgggtggcgatgcttttggtctgcagcattagatcgttgacgctgatcaggctcaccagcgcggtgtccttcagcagcaccagccactggttaccgaggccgggcagggcatggcgccacatctgcggcatcaccagacggaagaatatggccgctttcgacagccccagcgcctggccggactcccactggccctgcggaaccgctttcagcgcgccgcgcagcgtttgcgaggcgtaagcggcatacagcagcgacagggcgatcgccccgcagaggaatgggctgacgtcaaagttctcaatttgcatctgcaccgggatctgcgtgaacccgagcgggatggtgaaaccgtcagagagcgtcagcagcagctgggaagagccgaaatagataaacagcaccaccagaatttccggtagcccgcgcaggatggtcactatgccggttgcaagccaggctaccgggcgccatttcactgactccagtaccgcaaagagcatcgccaggaccaggccgatgacgagcgcgcaaacggcaaggccgacggtcatcccggcggcgcttgctaatggaaaaatttcgttcattcagtcttacttctggaaccatttgttatagatggtctggtaagtgccgtctttcttcactttttccagcgcagcgttaaatttctgctgcaggtcggtgttgccctgacgtacggcaatgcccagcccggtgccgaaataggctttgtcggtcactttatcgcccacggccgccagcttcggattgctcttcagccattcggtcaccacggcggtgtcaccaaagaccgcgtcgatacgaccgttctgcaggtccagcttcgcattctggtagctgtcgtaaggcacggtagtgatttccggatgtttatcggtgatgaatttctggtgggtggtgccgttctgcacgcccacttttttgcccttcagctgctcaatgctggtgaacttaccctgctggccgacgaacagcgccgagttgtcataatacggggtagagaacagcacctgcttttcacgctccggcgtgatgtccatcccggccatgaccgcgtcgaaacggcggaatttcagtcccgggatcaggctgtcaaaggcctggttggtgaaggtacaggtggcgtcgatctctttacacaacgcgttcgccagatcgacatcgaaaccgacgatctggttgttggcgtccaccagctcaaacggaggataagaggcctcggtggcgaaacgaatggtctgcgcggcggaagcggagaggctcatgcctgcgagcagggcggcaatcaatacttttttcatcgtcatttccccgaaaaacatcaatgtgaaagatagtttttaaacgcgtcagtttgcggatgcgtgaagcaggaggcatccccttgctcgacgatatggccattttccatatacaccacccggctggccgtcttgcgcgccacttcaacttcgtgggtgacgataacctgggtaatgccggtttcagccagctcgcggatgatgctgacgatctgagccgtgatttccgggtcgagcgccgcggtaggctcatcgaacagcagaacctgcggctccatcatcagcgcgcgggcgatagccacccgctgctgctggccgccggataaatgcagcgggtaacgatcgctgtacggcttcagacgcaggcgctccagcagcttctctgcgcgagccagcgcctgatccttgcttaaccccagtacgcggcagggggcctcgatcaggttctgctgtaccgtcaggtgcggccacaggttgtattgctgaaagaccatgccgacgttctgacgcagctcgcgaatcgctttatcggacggcgctctggtgaagtcgaattggttaccggcgatggataacgaaccggaccgcggcatctccagcaggttgagtacgcgcagcagcgagctcttcccggcaccgctggggccgagcagcaccagcgtttccccctgcgggcaatccagcgtgatgtcgaacagcgcctggtgtgcgccgtagaagcaattaatgccgtttagtttaatactcatctgggcagtctgatacgaatagctattgaggccgcaaatactacctttggcagaatagttatgcaatatttatgcgttaaaagttaaatctaaaccacgtttagctttaaagttagcacaaaatatggcctggtgggtgaggggggcgcaaatgtcggcattcctggggcgaataccgacattttaccggggttatcgtttcagcggcgtcgcttcaactccggaatcagcgtttctccagactctgtcgcagcgtcccggctggcgcatggctgttgttgccgagatagcgaacgtcatcgacggcccagcactggccttcctggatcatcagcacttcatctttccagctctgggtgccctgtttcagatcgacgcgcagcggaatattgcgcgcatcgcggttcgggatggtggaggcgctggcgaccacggcgctgtctgccggggtgctgctgctggagaacggattagcctgcagtaatttgctgttggcgggatcctggcgggcgtcattgagtaactgcgccaggccgtcgctcagataggggcgcagcgccgccggatcctgagtacgattctggatctgggtgtcgtagaatttttgcgctacgtcgtcagggccgccttcgacgcaggggccgctgcgggtgccattatctttataggccggggtgacggtcgtacaggcgctgagcgccagcgcgcaagggagaagtacagcaaaaagtttgtagcgcatgatgatttccttataagcgaactacgttttcagtttccgttaaagcatagcgtatagcgtgcggattgtacttgacgcaaagagctaagaccttgatgtggctacagccttagggcgggaaatcggcacggggatgacagaattccgtcaggcgctaaaaggcagggtagtataaaaataaacttaattttcccgtgaacaagaaatattatcccgtaaaatagggaaatggctcttgaaagataagggtaattatttcttcttatagatgcgagtggcgacgtgcatttttttatccgtattaccggaggaggggacaatgacgccccccttgttcatttgtttttttaatcagctcttcacgggcatcgttggatgcggtttgaccagtagaggaaatggcgccgattttggtatattgcgtatggactttatcaaaagctgttttgttaaaatctctgcggagacggcattggccgcttaaaacaatgctgtacctgccactaaagctgcatatttaatattcttagcccctattgtttatctcgctatcatcatgctcttctttgcattcaccaatgaatgatttcagattgaactcacactgctttttgtaagcaaaatgctgcaatttaatgacggttagttaacgctttttagcgaaaagatgacgtaattcgcagtgctgatgcttgttttttgagccggttacccatcgggagcggaccaggctattttcttcggtcgttagctgaaaatcaccctgagaggccggagctgaggggatagggcgctgacagacattcccggtaacatggtttatcatatagaaaagcaggggctgcgcccatggtcatgcaggtcaccagagagttaagatgttaacaaataagcgagagcgcgcccggcagcagcgagccgcgttgtgggccaccagagataatgtccagcgccatgcgctgtccatgagtatgccctggctggcctttgtcaatatcgcttttgcgttaatgattttcttccgcaatttgatctttacttattttgataagaggctactgacgcaccgggcggttattccttatatcgaagcggcgttgattgcggttattatcatttcggccattttagtgattattgccctcacgccgcgactggcgcagggacgatatacgttgaatatcatcaccgggctgctgctggcgctcagtctgtgctggtccctgagtaattattgttttatttttttctggaccttgccctttgcctggccgctgctggtgatattaatgactaccggcctcaccgcgctgtatcaccattggcccggcataaccgcttttatgctgccgctgtgggtgaccgccttgctggcgggaatacagctccactatcacaccgagatccgctttttgatcctctgggccatttttaccgcgattttgctgtatggccgacgtattttgcagcgctggtatgacgaagcctgggatacccaccaggagaatatgcagcttattcagcggctggaaagtatcgccaaccaggatgccttaaccggaaccgctaaccgtcgggcgctcaatgcttacctggcggcgatctggcagcaaaaaacgccgctggcgctgatgatgatcgatgtcgattattttaagcgctataacgatcgctatggccatcaggctggtgatgagtgcttatcttctgtcgcgcaggtgcttaaaatggcggtccgggcggagggcgatctggtggctcgctacggcggcgaagagtttgtcgtcgtgttgcccggggtgtccttagcgcatgccaccgctattgccgagcgcattcagcagaagatccgcgaggcaggcctaccgcacgccgcttcggcggtggcgtcggaggtcaccgtgagtatcgggatcgtcgcctccgatggcacggtcccgatagagacgctgatcgcccgggcggacagtgcgctgtatcaggcgaaaaataaaggacgtaatcaatggtcttattaacccggagacgctgccgggcaagggagaagggatgaaacggatgatgcggatcgtgctgctggcgctgctgctgaccggctgcgctggggaaaagggcattatcgatcgcgacggataccagctggacacccgtcatccggcgcaggctgcctatccgcgaataaaggtgttagtgatccactatacggctgacaattttgatgtctcgctggccacgttgaccgataaagaggtcagctcccactatttaattcctgaacagcccccgcgttatcagcataaaccgcggatctggcagctggtgccggaagaggatttagcctggcacgccggggtaagctactggcgcggcagtacgcgcattaacgatacctccattggcattgagctggagaaccgcggctggcagaagacggcgggcgtcaaaagttttaccccctttcatccggaacagattgcggctctgatcccgctggcgcgcgatatcatcgcccgctaccacatcgcgccgcagaatgtggtcgcccatgcggatatcgccccgcagcgcaaagacgatccggggccgttattcccctggcaacagctggcgcagcaggggatcggcgcctggcctgacgagcagcgggtggccttttatctgaacgggcggccggccagcgagccagtggaccccgaaatcgtactggatttgctctcgcgctatggctatcaggtgacgccggagatgacccccgcgcagaagaagcgggtgattatcgccttccagatgcacttccgtccgcagcgctgggatggggtagcggatgcgcaaaccgaagcgatagccgaggcgctgttagaaaaatatggccagggttagcggtgtagtttaccgtggtcgcgaagccaggcggcggtgcgcacgatgccctcgtcaagcgtcaccaccggctgatagcccagctcgtcctgcgcgcgggtgatatcgagcgtaaaatcaaagttaagcttggagacgccgtagtgggtaaacgcgggttctttggcggttttatcgccaaagcgctccatgctgcgggcgataatatccagcatcggatagggaactgagcggatccggcatttgataccgagctcgtcgatcaatttctgcacgatgctccgcaaggtgcgcggttcgccgttgctgatattccacgcgcgggcggagggaagatgatcgcaggccggctggctcgccagccacatcgcatgtacggcgttttcataataggtcatgtcgaccagcgcgctgccgccgcgcgggagcaggacgctgccataatgctgcatcatttgcgccagccgggggataaagactttgtcgtgcggcccaaacaggctctgcggccgcagaatggtaaaacgggtatgcgggttagcctgcgccagcaggttgatcacctcctcgctggccgccttgctgcgggcaaactcgttggcgaagcggtgtggacggaaatcttcctggatatcacgatgatggtgataatcaaaatagagcgatggcgaagagatatggacgaaattgcgcactccccatgccactgaccattcgcccagacgacgggtggcgcggacgttagcgagatcgaaagcctgctgagtgccccatggcgaggtaaagctggagcagtgccatagggtatcgataccggcgagcatcactttagcctgcgaagagaccagctcggttaaatctgccgggatgaattccgcccccattttgctcagaagcttgcccatcgcttcgttgcgcccggtcgctcgcacgctgatgcccttgttgcgcagatattccactgcgttgcggcctaatccgctggtcgcaccggtaaccagtaccttcatatcactctactgtcccagaaaagaatttcgtgcgcatttttccgtgattctcccgactatgcaatgagaatcatgaaagaataacgcttatccttcgactctgcctgagatttgttcggccagccgggcgatgcgttgcgccataccgcggaaaataaacaggtgcgccgggatcatcagcagccagtagatcaggcctggcataccgtgcgggtgccaccaggcgcgcacgtccagttcacgacgatcgcctttatcgttaatggtaaagcttaatcggcccagcccgggcgctttcataccgaatagcagggtgagctgtttttcttcctccacgataattaccttccagctgtcgaccgtatcgccggtttgcagataagcgcgctgcggccgccctttggccagccggtggccgaccagcagatccatcgcgccgcgggttttccacagcagattgccgaaaaaatacccctcttcaccgccgatttggttaacgacctgccacagggcctggcggcttgcctgagtggcgacggtgcaacctgcctgcttcggatagtagccgtactctggtcgccagcgggcgaaagcctgagcgtcgtagccccagtcgctggagtttactaactgctcttcttctttcagcgtgcggcgaaccgcctgatcgaaggggatcagcgtttgcgggatcagcgcccgcagcgcccgatcgtcagcgattagatcgtgcttcagcccctgaatcagcgccttggcgatggtcggcggcaccgaggtgatgacattgaggaaccacaccgagatccagcgcgtcggcaggggaatgggaatgagcgggcgatgtttaccgctgacggccataaagcgaatgaactgctgctgatagcttaacacctccggaccggcggcttcgaagacgcggtgcgcatcggagggatgattcagcagctcaaccaggtcaacgagcaggttttccagcgcgacaggggtagtacgcgaacgtacccagcgcggaggggttagcaccggcaggttataaaccatgtcgcgcatcacctcgaaggcggcggagccggcgccgacgataatcccggcccgcagctcggtcaccggcacgcccgactcacgcaggagatcgccggtaatctgacgagcgcgcagatggtcggactgctcctgcgccggggcctgcagcgaactgagaaatatcacctggcgcactgatgactgacgcagggcatcgcgcacatacgtcgccccccgccgctcatgggcgataaaatcaccgccttcgcccatgccgtggaccagataataaagggtatcgataccggtgagtagcgcaggcaggtcctgcggctgattgagatcgactgaccggcaggtaacgccgggcaaagcgagtttttgcaatcggtcgatatggcgtgccgccgccagcaccggatagccccgcgcgcttaatgtgcgcactaaatgctggccaatatagccgctggcgccgagcaccagaactgattgcgacacgcctgactccttagcgttgtaaaaaagcctgccagtgggcgaccacctcgctcagctgctgacggttgacatccaggtgagtgaccagacggacaacaggcgaggcgttaatcaataccccctgcgcctgcataaacttgccgagcgccggggcctgctcttcgccgacgcgaacgaacagcatgttggtatcgtgacgggtgacgtcggcgccgatagcgcgcagctgctccgccatccacgcggcgttgtcatgatcctcctgcaggcgctgcacgttatttttcagcgcgtacagcccggcggcggccaggatgcccgcctggcgcatcccgccgccgaccattttccgccagcggacggcgcggcgaatgtacgcctcgctgccgagcagcagcgagcctaccggagcgccaagcccctttgacaggcagatggtcaaggagtcgcagtattgggcgatatcgcgtaactcgcagccgtaggccaccacggcgttaaagatgcgcgcgccgtcgacgtgcagcgccagattgcgctggcgggtaaacgcccaggcttcctgcagatagtcgcgcggcagcaccttaccgttatgggtgttttccaggctcagcaggcgggtgggggcaaaatggatatcgtcgggtttgattttcgccgccactttatccagaggcagcgaaccatccgccgcggcgtcgatcggctgcggctgaatactgccgaggaccgccgcgccgccggcttcgtacagatagttatgcgccccctggccgacgatatactcttcgccgcgctggcaatggctgagcaggccaacgaggttggcctgggtgccggtgggtagaaatagcgccgcttctttgccggccaggtcggcggcatagcgctgcagttcattgacggtagggtcgtcgccatacacatcgtccccgaccggggcggccatcatggcctccagcatggcgcgcccgggacgggtaacggtatcactgcgtaaatcgatcacggcttttccttggtctggttcaacgtattgcttctgttttacctgagccagttggttttcgccagttcgatgacctcatcgccgcgcccgctgatgatcgcccgcagcatatacaggctaaagcctttggcctgctccagcttgatctgcggcgggatcgccagttcctctttggcgacgacgacgtcgaccagcaccggaccgtcggtgcggaaggcggtctgcagcgcttcatccacctcggaggctttttcaacgcgtatacctttgatgccgcaggcctcggcgatgcgggcgaagttggtatcgtggagctccgtaccgtcggtgagatagcccccggccttcatttccatcgccacgaagcccagcacgctgttgttaaagatgacaatcttcaccggcagcttcatctgcgccagcgacagaaaatcgcccatcagcatgctgaacccgccgtcgccgcacatggccactacctgccgctccggcgcagtggccttggcgccgatggcctgcggcatggcgttggccattgagccgtggttgaacgagcccagcaggcggcgtttaccattcattttgagatagcgtgccgcccagacggtcggggtgccgacatcgcaggtgaaaatggcatcttcatcggcaaaatgactgatctgctgcgccagatattgcgggtgaatggctttatcgctgggtttagccagatcgtcgagcccttttcgcgcgtcgcgatagtgctccagcgccttatcgaggaagtggcgatcggttttctcttccagcagcggcagcagcgccttcagcgtcgatttaatatcgcccaccagcgccatgtcgaccttactgtgtgcgccgatgctgccggggttgatgtcgatctggataattttcgcgtcggttgggtagaaggcgcgataggggaactgggtgcccagcaggatcagggtatcggcgttcatcatggtgtggaagccagaagagaagccaatcagcccggtcatgcccacatcgtacgggttgtcgtactccacgtgctctttgccgcgcagggcgtggacgatgggggctttaattttggctgcgaactccaccagttcctggtgggcgccggcgcaaccgctgccgcacatgagcgcgatattgctggagtagcgaataagctgcgccagcttgcgcagctcttcttccgccggggtgaccgtcggcagcggcgcatgataccagtggctgctggcgctttccggggcggccttcagcgccacatcgccgggtagcaccaccaccgagacgccgcggttaatcactgccttacgcatcgccactgccagcacctgcgggatctgctccggcgtggagaccagttcgcagtaatggctgcactcgcggaacagctcctgaggatgggtttcctgaaaatagccgctgccgatttcgctggatgggatgtgggcggcgatggccagcaccgggacatggttgcgatgacaatcaaacaaaccgttaatcaggtgcaggttgcccggtccgcaggagccggcgcagaccgccagctcgccggtcagctgcgcttccgcgccagcggcgaaagcggcgacctcttcgtgccgggtgggcatccagtcgatggtgcccatgcggttaaggctatcgctcaatccattgagggaatctccggtgacgccccagatacgtttcacgccggcctgttccagcgttttggcaatgtatgccgccacggtctgcttcatgatctccatctcctttttttgataacgccttcaagcttagatgaaactgaccgcaatgtaaccgattacccctgattttttgctggttttattcctctccggctgcgcatactcaggaagtacacaggatgcaaaacaggatgcacatcaaatggttaaaggattgttaaacacagtaaatcgcaggctgtcgcatgatgacgccggtaaactcttgttacgacttgccgtcggcggcttaatgcttttccatggaatccataagctgatagatggtgtggatggcattagcgggatgctggcggcgcagggattgcccgggtttatcgcctacggtgtgctggtgggggaagtggtcgctccctgcttgttaattatcggcgtcctgacccgcccggcggcgttggtgctggcgttcaccatggtggtggcgtggctgatggtcggcttagataagacgtttgcgcttgatgcggtgggagcgtgggccattgagaatctggtctatttctttgttggcgcactggcgattgcgctactcggcgcggggcgttattcgctggccggtcagtcggcctggcggtaaaaatgcctcattcgtcctggggcgtaaagtcgatactgttggcgatttgcaattttttcagtccgggaaagcgtttatctcatgtcgcctgagcgtttattgtcgccagggattttcccggaggcggcgcattgcgccttctccgggctaccaaatcgcacagcgctgtagccccggtaagcggtagcgccaccggggattttgacctcaggcgagaaccagatcgctctgcggatgacaggagcaggccagcacatagccgtcggcgatttcggcgtcggtcagcgtcatggtgctggtgacgctgtacttcccggaaaccactttggttttgcagcagccgcagacgccggcgcggcaggcgacggtcaccggcactttattgctctccagcgcgtcgagcagcgtggtgcccaccggcgcgtaaaactcgcgcgccggctgcagtttagtaaatttcagcccgctggtggcggcctcagccaccggggtgaagaatttttccttaaagaagcgggtgacgcccagggcggcaacatcctgctcgaccttctccatataaggcgccgggccgcaggtcatcacggtgcggctggctaaatccggcacgctctgcagcagctcccgggtcagacggccggcgacaaaatcgtgcgtcgcattgtgctccgctaccagggtgaccgggtagttgcgccactcttcggcaaagattacatcttccggcgaacgcacgttataaatcacctgtacgtcggcctgcggtcgatacttagccagccagcggcgcatcgccatgatcggtgtcacgccgcaaccggcggccagcagcaggaatttatcttccgctttatcgtcgcaggtaaactcgcccatcgcatcggacagccaaaggtaatcgccgcgtttgacctcgcgggtcaaccactgcgaacccgtaccctcgtcaatacggcgaacggtcagcgtaatgtattcgctgacccccggcgtcgaggagagggtataggcgcgcagcgtttccgccgagttacgcacgctaaccagagcgtactggccagcgcggtacggatagtaatcgtggcacagcagcgaaagggtccacacgtccggggtttcctggtgaatgtggtgaacctgcatccgccacgggcactgggaggttggcatagtcatcagggactccttaagcgctcagcagctgctgcatatcttgttccacggtggtcacggaacgcagaccaaacttctcattgaggaccgccagcagatccggggtgaagaaaccaggcgccgtcggaccggtgacgatgtttttcacacccagcgacagcagcgtcagcaggatgacgatcgctttctgttcgaaccaggagagcaccagcgacagcggcagatcgttgatgccacagcctagtttctccgccagcgtgaccgccagaataatcgccgagtaagcgtcattacactgcccggcgtcgaccaggcgcggcagcccttcgatatcgccaaagtccagtttgttgaagcggtatttaccacaggccagggtcaggatcaggcagtcatccggcacgctggtggcgaaatcggtgaagtagttacgctccccgcgggcgccgtcgcagccgccgacgaggaagatatggcgcagtttttcacgactgaccagatcgatcagcgtatccgccgcgccaagcagggtctgacggccaaagccgacggtgatcagatgcgggatttcgctgtacgggaagcccgccatctgctgcgcctgggcaatgaccggggagaagtcttcgccttccagatggttcacacccggccagccgacgatgctgcgagtccagatgcggtcgtcgtaggcgccgacggtcgggtcgatgatgcagttagaggtcatcacgatggggcccgggaagcgggcgaactccacctgctggttttgccagccgctgccgtagttgccaatcagatgtttgaatttacgcagctccggatagccgtgagccggcagcatttcgccatgagtatagacgttgacgccggtgccttccgtctgctccagcaggttatacagatccttcagatcgtggccggagatcaggatgcacttcccttcggtggctttaacgttgacctgagtcggcgtcggatggccgtatttggtcgtttcaccggcgtcgaggatgctcatcactttgaagttcatctggccgatttccatcgaacattcgagcagcgcattcatatccgcaggccaggtgcccagccatgccatgattttatggtactgggcatagatagcgttgtcgtactggccgagcacgtgggcgtgctccatataggccgccgcacccttcagaccgtacaggcacagcaggcgcagacctagaatattctcgccgatggcggctttatctttattcggggtatagtccgccgcctgacgctgcaggtcgcccagatcgtcgctgaccagctgcaggtcggcgaccgggctgtcgaccgcggcgctggcatcgatcgccaggcattgcgctttcagcgcctcacgcagggcaattgcctggcgggcgtagccgacgatgcgcggggaatcgaagttaacgttagtcagggtggagaagaaggcgcggggggcaaagctgtcgacctgatgatcgataatgccatattcgcgcgctttaagcgcccaggcggacaggccttgcagtgacgcaatcagcagatcctgcaggtccgaggtttccgctgttttaccgcacatcccctgcgcgtaagagcagccgttgccggctggggtacgaatggtttgttcacattgcacacaaaacatggtcacacctttaaagttatatttgatatacatgtttaaggttatgccgcgcggcaacgggtgaaaaggtatttctaagacaacttaaagggagattgatttagcgcaaatttggcggcaggagggctgccgccaacgggtgctcaggcggtaaaaaaggcgatcaggatcgggaccagcaaactaagcagaaaaccgtgcacgatggcggcagggacgatttcgacgccgccggaacgctgcagtaccggtaaggtgaagtccatcgaggtggcgccgcacagccccagcgccgtggagcggctgcggcgaataaggcccggaattaacatgatggccagcagctcgcgacagagatcgttaaagaacgccgcgctaccgatgaccgggccaaaggattcggtgagtaaaataccggagagcgaataccagccgaaaccgctggccattgccagaccggtctttaacggcagaccgagaataaaggcgttaagtatcccgccgagtaatgaactggccgtaaccaccacggcgacgatcattccccggcggttaaggactatttgtcgcagactcattccattattgcgtaattggataccaacgaggaacaggagaaagatcaacgtatattcgctggcttctgtcgcgtgctgtaaaaaaggcagtctggtcagaccgagcagaaaaccgagcacgaccacaccgcacagctgcagcgattccagggccatggccaggcgcgagggtaatttctcctgacgatgctgactgcgccatggcattttactttccagccacagcagtgcggcgatattacacagtaaaatgataaccacgctcaccgcggcgtaatgcaatattgccagcaggttgctggccagattgtcgaggaacgccaggctgatacccataaaaaaaaggattacatagacaatccagctgagcatgcggtttatcagctttagcgcggaggagtgacgaagaggcagtaaatagccgacgaccagcggcaacagaataataaagagtcccgaaaacatgaacgatgcagcccttgcatgatgagaatagcgcccatgacactacccaaatcaccgggccgagtaaagctgtcgccagaaagaaaaagcccggagacccgggctttgaaaagcgttaatcgcgtttttccagcagggtgcgatacagcacgccgccgaggatcccgccgacgattggcatgacccagaacagccacagctgctgcagcgcccagccgccctggaaaattgccaccgcggtgctgcgcgccgggttgaccgaggtgttggtgactggaatgctgatcaaatggatgagggtcagcgccaggccgatggcgatgggggcaaagcccgccggcgcatgtttatcggtcgcgccatgaataaccagcaggaagccgcaggtcaggacaatttcaatgacgatagccgacagcatagagaagccgcccggggagtgttcgccatagccgttggaggcgaagccgctggcggcggcatcaaagccggctttaccgctggcaaccacgtacagcaccgccgcggcaataattccgccgaccacctgagcgataatatagccaatgacctcttttgccggaaaacggccgccggcccacaggcctaaggtgaccgccgggttgaaatgccccccggaaatatggccgaccgcaaacgccatggttaataccgttaagccaaatgccagcgcgacgccggcaaaaccaatacccagctcggggaaagccgcggcgagcacggcgctaccgcagccgccaaatacaagccagaaggtgccgaagcattcggctgctaattttctgaacataaccacctcaattaaattgtttacgcgcacgagcggaccgtgccggtctttatttatcgtgataagggatgacgataaaaataaagcggcgttattctagagataatcgccatcccggagccagttaaatatattgatattatttgatttagggcaaggtgagtggattccttttgccagtttagcctttcctttatccatggaagattatcaatagtgtagatcataacgcctgaaataaaactattttgtttgatgaataatcaacagccggtaataggcgataagtgagtaattttatgaatatatttaatccgctgaatatgagccacggatgcgattaagcagagtgtcatcttgcctccgccctcgctatactgttgattactgaaggagagtggtggtgtagcggaggggatatgcttcttgagcgcgtagaaatcgtcggttttcgcggtatcaatcgtttgtcgttgatgctggagcaaaataacgtcctgatcggggagaacgcgtgggggaagtccagtctgcttgatgcgctgaccctgcttttgtcgccggagttcgatctttatcactttgttcgcgatgatttctggtttcccccgggcgacatccaggggcgcgaacaccatttgcatattatcctgaccttccgcgaaacggagccaggccgccatcgggtccggcgtttccgtccgcttcagcgctgctgggtgccttgcgatgacgggtatcaccgggtgttctatcgcctggagggcgagctcgccgaagatgacagcgtgatgaccctgcggagctttatcgatggtgaaggcgaagcgttggtgctggaggagattgatgagctggcccgacacctggtgcgtttgatgccggtgctgcgcctgcgcgatgcgcgctttatgcgccgcatccataacgggacggtaccgcactcgccgcagatagagatcaccgcccgtcagctggattttctctcccgcgaactggtcagccatccgcaaaatttatcggacggtcagatccgtcaggggctatcggccatggtgcaactgcttgagcattactttgccgagcaaagcagcgctcagacgcggcatcgcctgatgcggcggcgctcccatgatgaacagcgcagttggcgttatctggatattatcaaccggatgatcgacaagcccggcgggcgcagccatcgggtgatcctgctggggctgtttgccacccttctgcaggcgaaagggacggtgcgcctcgatcgcgacgcgcgaccgctgctgttgattgaagatcccgagacccgtctgcatccgatcatgctttccgtcgcctggcacctgctgaatttgttgccgctgcagcgtgtgaccaccaccaactccggagagctgctgtccctgacgccggtagagcaggtctgccggctggtgcgtgagtcgacgcgggtatcggcgtggcggttggggccgggcggaatgaatgccgaagagagccggcgcattgcttttcacatccgcttcaatcgcgcctcatcgctcttcgcccgctgctggttgctggtggagggagagacggaaacctgggttatcaacgaactggcccggcagtgcggtcatcattttgatgctgaaggggttaaggtgatcgaattcgcccagtccggcctgaagccattgatcaagtttgcccgccggatggggatccagtggcacgtgctggtggacggcgatgaggcggggaaaaaatatgccgcgacggtacgaggtctgcttaataacgatcgcgagctggagcgcgaccatctgaccagtctgccggcgctggatatggaacactttatgtatcgtcagggatttgatgacgtttatcatcgggtggcgcagatcccggataatgtcccgatgaatatgcggcgggtgatcaccaaagccatccatcgctcatccaagccggacctggcgattgaggtggcgatggaggccggccgccgtggcgtggacgctgtgccgacgctgctgaagaaaatgttctcacgggtgctgtggctagcccgcggtcgtgccgattaatctcaccgccgtcgtcatttacggcggcacaaagctctccggcagctaaacaaaacctcattgacgcgaaaaatgggtgtcctgttgccaacgggtttcgatagaatcaccgcctggagcggcagggaaacagcaggaatcggaatatgaaagtgaagggaaaacgcaggaccgtctggtggctgttggcgatcgttgtgctggggctggctatctggggatggcggatcctcaatgcgccgctgccgaactaccagacgctggtagttcgcaaaggggatctccagcagagcgtgctggccaccggcaaactggatgccctgcgaaaagttgacgtcggcgcccaggtcagcggacagctgaaaacgctgcacgtcaatattggcgataaggttaaaaaggatcagttgctgggggttatcgatccggagcaggcgcaaaaccagattaaagaggtggaagcgacgctcatggagctgcgcgcccagctcaatcaggcgcgcgcggagagcaaactggcgcaagtgactctggcccgtcagcagcagctggcgcagcgtcagctggtctcgcggcaggaccttgataccgcggccaccgatttggcggtgaaacaggcgcagatcggcactattgaagcgcaaataaagcgtaaccaggcgacgctcgatacggcgaagaccaacctcgattacacgcggatcctggcgccgatggccggcgaagtgacgcaaattaccaccctgcagggacagacagtgatcgccgcccagcaggcgcctaacattctgacgctggcggatctcagcaccatgctggttaaagcgcaggtctctgaggcggatgtcatccacctcagaccggggcaaaaggcgtggtttaccgtgctgggcgacccgcttacccgttatgaaggtaaactgaaagacattctgccgacgccggaaaaagtgaatgacgccatcttctattatgcccgcttcgaggtaccgaacccgcaggggatcctgcgcctcgacatgaccgcgcaggtgcacattcagctggctgaggtgaagaacgtgattactatcccgctgagcgccctgggcgacgcggtaggcgataaccgctaccacgttcgactgttgcgcaccggtgaggtcaaagagcgtgaggttatcattggcgcccgcaatgataccgacgtcgcagtggtgcaaggtctggaagagggcgacgaagtgatcgtcggcgagagcgcgagcggggcggcaaaatgacggcgctgcttgagctgcgagatatacgtcgcagctatccttccggcgacggcagcgttgaggtcctgaaggggatcaccctcagcatccatgcgggtgagatggtggcgatcgtcggggcctccggctcgggaaaatcgacgctgatgaatatccttggctgcctcgacaaacccaccagcggcacctatcgggtagcgggaaccgatatcgcgcagctggatggcgatgcgctggcccgtctgcggcgggaacactttggctttatctttcaacgctaccatttgctgtcccatctgaccgccgcgcagaatgtcgaagtgccggcggtgtatgccggcagtgaacggcgcgcgcgcctggcgcgcgctcatgagctgctggtgcggctggggctgggcgagcgcgccgactatcaaccgtcacagttgtccggcggtcagcagcagcgggtcagtatcgcccgcgccctgatgaatggcggggaggtgatcctcgctgatgaaccgaccggcgcgctggacagccattccggcgaagaggtaatggcgatcctgcaccagctaaaagcgcaggggcatacggtcatcattgtgacccacgatccgcaggtcgccgctcaggcggagcggatcgtcgagatccgcgatggcgagatcgtccgcaacccgcccgccagccgccagggcggcggactgcgcgcccgtccgcaggcggagccttcggcgtggcgtcagtttaccagcggctttcgcgaagcgctggtgatggcctggcgagcgatggcggcgaataaaatgcgtaccctgctgaccatgcttgggattattatcggtattgcctcggtggtgtcgatcgtggtggtgggggatgccgccaagcagatggtgctggcagatattcgcgccatcggcaccaataccattgatgtatatcctggtaaggattttggcgacgacgacccgcgctatcagcaggcgctgaagtatgacgatttgctggcgatccagaagcagccgtgggtgcgctccgccacgccggcggtttcaaaaagcctgcgcctgcgcgccaacaatattgacgttgccgccagcgcggagggtgtcggtccacagtattttaatgtctacggcatgacctttagcgaaggcaataccttcaatgaactgcagctcaacagtcgggcacaggtggtagtgctcgacagcaatacccgtcggcagctgtttcccaataaagcgaaagtggtgggagaggtgattctggtgggcaatatgccggccacggtgattggcgttgcggatgaaaagcagtcgatgttcggcagcagcaaaattctccgcgtctggttgccctacaccaccatggcgggaagagtaatgggccagtcgtggctgaactccatcactgtgcgcgttcatgaaggctacgacagtgaaaccgcagagaaacagctgctgcgtctgctggagctgcggcatggtaaaaaagatgtattcacctggaatatggacagcgtcttgaaaaccgccgaaaggaccacacataccttacagctgttcctgacattggtggcggtgattgccctggtggtcggcgggattggcgtaatgaatattatgctggtgtcggtgaccgaacgaacccgggagatcggcatccgcatggcggttggcgcccgggccagcgatgtgctgcagcagtttcttattgaagcggtgctggtttgcctggtcggtggcgcgctgggcgtagcattgtcgctgatgatcgcctttattttacagctgtttctccccggctgggagattggtttttctccgctggcgctgctgacggcgtttctctgttcgacgctgaccggggtgctgtttggttggctgcctgcgcgcaacgcggcgcggctcgatccggtggatgccctggcgcgagaataggcggggcgagaaataaaaatgccagtcagaaggactggcattttattagcaggatgtacacaatgaagcaaaagagttatgcagccgtttccgcttccacagggacgatcacgctggcgtgattgccttttggcccctggtgaacatcaaaccgaacggcttgtccggcttttagcgttctgtaaccatccatctggatggtggagtaatgggcgaaaatgtcttcgccgccgccctcagggcagataaaaccgaaccctttggcattgttgaaccacttaacagtacccatttccatacttcgacatccttcgtaaatctttattagtaagatggaatgaaccggtggtggagtgacgagttgttcaattgctcgccaactctcgccactacaatttagagaaatacgaaaacgcgtcaagcgattgaggagggggaacggcgaaaaatgcgtcaaaatttgaagcagttaacgctattgccggggaatgtgacagccgtcgcggatagaagcgatagatgatagttatctatgatctattgtagatttgtgatgagcataacctctggtcatcgacaggcctccgcctgttggcaacagcaaccgatgatgaacactgacgatgagtaagagagattggctggacttcgagcacctggttgacgacgaagttcgtgatgcgattaaaccgccatctatgtataaagtgatattggtcaatgatgactacactccgatggagtttgttattgacgtgttacaaaaattcttttcttatgatgttgaacgtgcaacgcaactgatgctcacggttcactatgaaggtaaggcgatttgtggcgtgtttaccgcggaagtggcggagaccaaagtcgctatggtgaatcagtacgcgagggagaacgagcatccattgctgtgtacgctggaaaaagcctgaatacaggcatgaaaattgggggaggtgcctatgctcaatcaagaactggaactcagtttaaatatggctttcgccagagcgcgcgagcaccgtcatgagtttatgaccgtcgagcacttgctgctggctctgctaagcaacccctcggcccgtgaggccctggaagcgtgttcagtggacctggtggcattgcgtcaggaacttgaagccttcatcgaacaaaccacacccgttctgccagccacggaagaagagcgcgacacccagccgacgctaagcttccagcgtgtgctgcagcgcgccgtcttccacgtacaatcttctggccgcagcgaagtgaccggcgccaacgtgctggtggcgattttcagcgagcaggagtcgcaggccgcctacctgctgcgtaaacatgaagtgagccgtcttgatgtggtgaacttcatttctcatggtacacgcaaagacgagccgagccagtcttccgataacagcggaagccagcctggcaatgaagagcaagccggcggggaggaacgtatggaaaacttcaccaccaacctcaatcagcttgctcgcgtcggcggcattgatcctctgatcggccgtgaaaaagagctggagcgcgcgattcaggtcctgtgccgtcggcggaaaaataacccgctgctggtgggggaatccggcgtcggtaaaaccgcgatcgccgaaggccttgcctggcgtattgtgcagggcgatgtgccggaagtgatggccgactgcactatctactcgctcgacattggctctttgctggcagggaccaaatatcgtggcgattttgaaaaacgcttcaaagcgttgctcaaacagctggagcaggataccaacagcatcctgtttattgatgaaatccacaccattatcggtgcgggggcggcgtctggcggccaggtcgatgcggctaacctgatcaaaccgctgctttccagcggcaagatccgggtgatcggctccaccacttaccaggagttcagcaacatctttgaaaaagatcgtgcgctggcccgccgtttccagaagatcgatattaccgaaccgtcggtggaagagacggtccagattatcaacggcctgaagccgaagtacgaagcgcaccatgatgtgcgttataccgccaaagcggtgcgtgcggcggtagaactggcggtgaaatacattaacgatcgtcatctgccggataaggcgattgacgtcattgacgaagcgggcgcgcgggcgcgcttaatgccggtcagcaagcgtaagaaaacggttaacgtggcggatatcgaatcagtggtggcgcgcattgcgcggatccctgagaagagcgtctcccgcagcgatcgcgacacgctgaaaaacctgggcgaccgtctgaaaatgctggtctttggacaggataaagccatcgaggcgctgaccgaggctattaaaatggcgcgcgccgggctgggccatgagcacaagccggtgggatcgttcctgttcgccgggccgaccggggtcgggaaaaccgaagtgaccgtccagctggcgaaggcgttagggattgagctgctgcgctttgacatgtccgaatatatggaacgtcataccgtcagccgtttgatcggggcgcctccgggctacgtcggcttcgatcagggcgggctgctgaccgatgcggtgattaaacatccgcacgcggtattgctgcttgatgagatcgaaaaagcgcatccggacgtgttcaacctgctgctgcaggtgatggataacgggacgctgaccgataataacggccgtaaagcggacttccgcaacgtggtgctggtgatgaccaccaacgccggggtgcgggaaaccgagcgtaaatcgattggccttattcagcaggacaacagtccggatgcgatggatgagatcaaaaagatctttacgccggagttccgtaaccgcctcgacaacatcatctggttcgatcatttgtctaccacggtgatccatcaggttgtcgacaagtttatcgtcgagctgcaggtccagctggaccagaaaggcgtctccctggaagtgagtcaggaagcgcgcgactggctggcgacgaaaggctacgatcgggcgatgggggcacgtccaatgggacgcgtcattcaggacaacctgaaaaaaccgctggcgaacgaactgctgtttggctcgctggtcgacggtggtcaggtcactgtctctctggacagcgacaaaaatacgctgacttacgacttccagagcgcgccgaagcacaaaccggaagcggcccactaaggcgatatcttcaatgtaaaaaaaccggccaggggccggtttttttttgctgacggcagatgacggcagaaatgaaaagaccgggaattatcccggccttcagcatctgacgccttaggggcgaaaacaatcagcgactacggaagacaatgcggcctttgctcaggtcgtacggggtcagctcaacagtcactttgtcgcccgtcagaatgcggatgtagtttttacgcattttaccggagatatgcgcggttaccacgtgaccgttttccagttctacgcggaacatagtgttaggcaacgtttcaagtacggtgccctgcatttcaatattgtcttctttggccatctagtcctctggggtatcactaccgtagttttgaaccggcaagataatgccgaagttcatcatgtaagtaaagttttacgtatctaccctgaatcattcaccttgccgcaaggcgcatagtcagcgcagcggctacggaaatatgacgggtatgaatcgccgaagtagttttggcgcattgcccgggacacacacggccatgccgcgtgacaggcgcaaacgtaaaggggagtgacagaacgatgggcgttatctgactcttattattcccaaacggcggcggggcaacaggcagaagctactctaccgcgcaattataccatcctgacgcaaaatgtgctgaaaacattttattatccgccaggaaatagcacccgcggcacccaaaatcgctcgggcagtcggtagccgcgtaataccgacagatagtccagataatcgcggcggggaatatccactgcgcctaatgacgcggtatggttgttcagtacctggcagtcaattaatttaccgccgctgtgcgcaaagtcctggcaaaataccagcagcgcggttttggaggcattttctgcccggctaaacatcgattcgccgcaaaacagcgctccctgcgctacgccgtacattcctcccaccagggtattctcctgccagacttcaatggagtgggcatgacccagctcatgcagctggtgataggcgcgaacgatactgctggttatccaggtgccttcgtcacgatcgctggcgcagccctcaatcacttcgccaaaggcgtggttgagcgtgacccggtagggcgaacgctgatgaaagcgcttcatgctgcggctgagatggaattgctctggccaaagtaccgcccgggggtcgggcgaccaccagaggatcgggtcgccaggggaaaaccagggaaaaataccacgctgataggccatcagcagccgcgcggggctcagatcgccgccgagcgccagcaggccattaggttctcgcaaggcgccttccggagaggggaaggcgatagagtgccgggagagctgaaccagacgcattttaacctcaatacgcatcagcaaaaattagataatagaatagcctacagacgctgtttaaactggaagtaccggccctgtttagcgagcagctccgcgtgactaccttgctcaattatctggccgttgtccatgactattatctgattaaaacccgccaggccccgcaggcgatgggttaccatcagcacggttttgtcgcgcatgacatccgccagcagatgcaggatctggctttcggtggccgcatccagaccttctgtcggttcatcgagcagcatcagcggcgcatcgtggagcagcgcgcgggcaatggccagtcggcgcagttcgccgccggagagctgacgcccgccttcgcctagccagccgttaagaccgccatcttgcagcagtttttcgaggcccaccttctcaagggtagcgctgagatgagcgtcatccgcttcaggcgccgccagcagcaggttgtcgcgcagggtggcgctgaacaggtgcacgcgctgcggcactacgctcattgcctgccgcagagtggcttcgctgaggccggagagcggctgattgttgagcagaatctctccctgtgacgggtcccaggcgcgggtaagcaactgcaacagcgtcgattttccgcagccggtccggccaagaatggcgatgtgctctccggcggcaatctgcagggaaatattctccagggcaggggagggctgctgaggatagcggaaggtgacctcctgaagcgttagggccacctgcgctggcggactggcttcatcttcgacaaaggtgacctccggctgctggtcggtaatctgcgagatccgccgcgcggaggcgatcacctggcctaaatgctggaaagcgccagtaaccggcgccagggcttcaaaagccgccagcgcgcagaatacgaatagcgcgatcagcgccccgggctgactattgccgccgacgccgtctgaggccagccagagcatggccaccacggcgatgccaccgattaacagcattaccgcctgcgaaagcgcggtcagctcggcctggcgccgctgtgcatcctgccagctcagctcggtcttttccatttgtgcgcggtagcggtcgctggcgttaaataccatcagctccgcctgaccctgcagccaggcggtgagctgttggcgatactggccgcgcagctgcgtcatactttcgccggctggcttacctgcgcgatagaacagcggcggcataaccagcagggtcgccagcatgataccgccgagcgtcagcgcgagggtgacgtcgagcagacttaatccgcaggtgacgaccacaatcaccaccagcgcgccgaccagcggcgaaatgacccgcaggtagagatgatccagggtgtcaacgtcggctaccacccggttgagcagctcaccctggcgaaagcgcgccagccccgccggagagagggggagcagtttgctgaaggtgaaaacgcgcaggtgctgcagcacgcgaaaggtagcgtcgtggctgaccaggcgctcaaagtagcgcccggcggtacggataattgccgcgccgcgaacgcccgcggcaggcagcatatagttaaaactgtagatcccggcgacgcccaccaccgctgaggcggagaggaaccagccggagagcgtcagcaggccgatgctggccagcagggtcacaatggccagcacgacgccaagcagcagcatccatttatggcgtttatagagcgccagatagggtaaaagtgcacgcatttaaatctcctcctgacgatgggccagcagcgccgagaagaccccaccagcacgggccagcgtggcgtagtcgccttgttcgataatctgtccgtcctgcatcacccagacgtcgtcccagtcggccagcccctcgagctggtgggtgaccagcagcgtggtttgctcactggaggcgtgggtcagggcctgcatgactcgctgttcgctatgggcgtcaaggctggcggcaggttcatccagcagcagcaggcggcacggcaccaacagcgcgcgggcgaccgcgatacgctgcgcctggcctaccgacagacgccccgcctgatcgcctacggcggtatggatcccctgcggcagcagggcgataaactcgctgacccaggccttgtccagcgccagccgaagctgtgcttcgctagcttcgggccacgccagcagcacgttttcccgcagcgtggcggcaggcaactgcggattctgtcctacccagctcagcaggcggcgccagcgctcagcgtccagctcgcgcagctctacgccgttgaccatcagcgacccctcatagggcagaaagccgagcagtgtattcagcaaagagcttttcccggatccgctctggccgaccagcaccacgcgagcgccggcgggcagcgcaaaattaagcggccccgccagaactttaccttccggagatttgatcaccaggtcgcgcgcttccacgctaatcagatcgttgtcatttaacgttttctcgccacgctctacctgggtcagcggcgtttccataaacgttttcaggctgtctgcggcgcccacggcctgagctttggcatggtagaaggtacccaggtcacgtaacggctggaaaaattccggggcgaggatcagcgtcagaaatcccgccatcagcgtgacgcccgcgccatagtggccgaagttcagctcgccaaggtaagaaaagccaaaatacaccgctaccagcgcaatggagagggaggtgaaaaactccagaaccccggaggagaggaaggccagacgcaggacttccatggtgcgttggcgaaaatcctgcgaggcgtcgcgaatattatcggtttcagcctgaccgcgatgaaaaatacgcagggtttccatgccgcgtaggcggtcgaggaagtggccgctgaggcgggccagcgcctggaagttacgccggttggcgtcggcggcgcccatcccgaccagcgccatgaaaagcgggatcagcggggcggtgccgagaaggattagcgcggcggcccagttaatcggaaaaatagtaataacgatcagcagcggtacgcaggccgccagcgtcatctggggcaggtagcgggcataatagtcgtgcatgtcgtcgatttgctcaagaataagcgttgcccagctgccggccggtttgccctggatccacgccgggcctgcctgctggaggcggtcaagaacctggcggcgaatttcatagcgaatatgctgcccggcctgaaagccgacccgctcacgcagccagaccacccaggcgcgtagtacaaagatcagcaccagcagcgtgagcggcagcagcagggcggtcgctggaatattctccatcaccatccggtgcaggatccgcgccaggaaccaggcctgcgccacgatcagcagaccgctcgccacgccaagcaggcgggaaaacatcaaccagcgacgggagataatgctttgctgttttaaccagcgggttaactcttgttgacgggttttattcattgcgcgctttgcaggtgtcgttatcggagtattgggcacggcaatgttacatcgcagcaaaaataaaggcgacttttcgtcgccttctttacctttgttactgacttgtaaagattatttgcaagcgtcagccaaaccgtcgaggtaacgctccgcatccagcgccgccatgcagccggtgcccgcagaagtgatggcctgacgatagatatggtccatgacatcgccggcggcgaacacgcccgggatgctggtctgggtcgcgttgccgtggataccggactgcactttgatgtagccgttctccagctccagctggccttcaaagatggcggtgttcgggctgtggccgatggcgacaaataaaccagccacttccagggactcgacattgtcgctgtttttggtatcgcgcaggcgcaggccgctgacgcccatctggtcgccggtcacctcttcgagggtacgatcggtatgcagcacgatgttgccgcttgccactttatccatcaggcgtttgatgaggattttttccgcacggaaggaatcgcgacggtggatcaggtgtacctcagaggcgatattcgacagatacagagcctcttccactgcggtgttgccgccgccgatcaccgccactttctggttgcgatagaagaatccgtcgcaggtagcgcacgcggaaacgccgcggcctttgaaggcttcttcggaaggcaggcccaggtaacgggcggaagcgccggtggcgatgatcagcgcgtcacaggtgtactcgccgctgtcgcctgtcagacggaacgggcggttttgcaaatcgacgcggctgatatggtcgaaaatgatctcggtttcaaattttgcggcatgctcgtgcatgcgctccatcagcagcggaccggtgagatcgttcggatcgcctggccagttttccacttccgtcgtggtggtcagctgaccgcctttttccatcccggtgatcagcaccggctgcaggttggcgcgtgcggcatagaccgccgcggtgtatcccgcaggtccagaaccaaggataagcagtttactgtgtttggctgtgcccatgagatccccataataattggcatacattgggctgggattgtagggaatttgttgtcgtaaaaaaagagcacagcgattttgttaacgatgtgtgcaatagaagctgccaatgaattggtgattttcccggcaaggaatataactatttctactgtcggtgggacaattataagacgaaaaaatgagaatcaaccagggcggatgatgaatatctggcatcttgtactaaaaatcgatgttttgctttgacaatcacctgtgcttttgcgaaaacattcaaggaagaagaaaagcagtatttagcgtgcggcgaattttcatgcacgcaaatgccatttttatccgggttaacgaaatctacgcatggtgtggacagacgccatgcgtgatgtcggtgactgccgtcaggcaacgggcttctcacgtacccctgggttacccaatgtcgtacgggtgataacaggatgggctctggcagtgaaggctcagagccggaacaggagtagggaaggaatacagagagacaataataatggtagatagcaagaagcgccctggcaaagatctcgaccgcattgatcgtaacatcctgaatgaattgcaaaaagatgggcgaatttctaacgtcgagctttctaaacgggtgggactttctccgacgccttgccttgagcgtgttcgtcgtcttgaaagacagggttttattcagggctatacggcgctgctcaacccgcattatctggatgcatcacttctggtatttgttgagattactctgaatcgtggcgcaccggatgtgtttgagcaatttaacgccgcagtgcaaaaacttgaagaaattcaagagtgtcatctggtttccggtgatttcgactatctgttgaaaacccgtgtaccggatatgtcagcgtatcgtaaattactgggcgagaccttgctgcgcctgccgggcgttaacgacacccgtacctacgtggtaatggaagaagtcaagcaaagtaatcgtctggttattaagacgcgctaacacggaacaggtgcaaactcgacgtagtttgattacactcctgttaatccatacagcaacagtgccggggagacccggcgctgttgtccgttttagcagcaggcaggaaacagcctgatacctggagagcctttcttgagccaggaatacaccgaagacaaagaagtcaaactaaccaaactcagcagcgggcgccgactccttgaggcgatgctcatcctttgctccctcttcgccatctggctgatggcggcactactgagctttaacccctcggaccccagctggtcgcaaacggcatggcatgagcctattcataatttaggcggcgcccccggcgcgtggcttgccgataccctctttttcatttttggcgtcatggcctacaccatcccggtgatcatcatcggcggatgctggtttgcctggcggcatcaggaaaacgacgaatacattgattattttgccgtttcccttcgcctcatcggtgcgttagccctgatcctgacctcctgtggtctggcggcgattaacgccgatgatatctggtacttcgcctccggcggggtgatcggcagcctgctgagcaccacgctgcaacccctgctgcacagcagcggcggcaccatcgccctgttgtgtatctgggcggccgggctgacgctgttcaccggctggtcgtgggtcagcattgcggaaaagctgggcggcggcatcctgtccgttctcacctttgccagcaaccgtacccgtcgggatgatacctgggtcgatgaaggcgaatacgaagacgacgaggaagagtacgacgacgaagaggcggccaggccgcaggaatcgcgtcgcgcccgtatcttacgcagcgcgctggcgcggcgtaagcgtctggccgagaagtttaccaaccctatggggcgtaaaaccgacgctgcgcttttctccggcaaacggatggatgacggcgaagaggtggtgcaatacagcgccagcggggcgcctgttgccgccgacgatgtactgttttccggcgccagcgccgcgcgtcccgcagaggatgatgtgctgttctccggcgccagcgccgtgcgcccgggcgatttcgacccttacgatccgttgttgaatggccacagtatcgctgagccggtaagcgcagcggcggcggctactgccgcgccgcaggcgtgggcagaatcaccggtgggccatcacggcgctgcgccagcttatcagccggaagccagctatccgccgcagcaggcctatcagcctgaacccgctccgttccagcaggctgcttatcagccgccagcggggcaaaccgcaccgcaggcgtatcagcctgagccagcgccgtatcaacagccggtttacgatccgcgtgccggtcaacctgcgccgcaggcctatcagcctgagccagcgccgtatcagcagccggcttacgatccgtatgccggtcaacctgcgccgcaggcctatcagcctgagccagcgccgtatcagcagccggcttacgatccgcatgccggtcaacctgcgccgcaggcctatcagcctgagccagcgccgtatcagcagccggcttacgatccgtatgccggtcaacctgcgccgcaggcctatcagcctgagccagcgccgtatcagcagccaacttacgatccctatgccggtcagcctgcgcctcagacctatcagcagccggcttacgatccgaatgccggtcagcccgcgccgcagacctaccagcagccggcttacgacccgcatgccggccagcccgcgccgcagccgtatcagccggagccagcggcgtatcagccgcaaagcgcgccagttcccccaccggagccagagcccgaggtcgtgcaggaggaagtgaaacgtccgccgctctattatttcgaggaagtggaagagaagcgggcgcgcgaacgcgagctgttggcctcctggtatcagccaattcctgagccggaaagtccgattgccactaaaccgctgacgccgccgaccactgcgtccaaaccgccagtggagacaaccgtagtctctgcggtagcggctggggtgcatcaggctaccgccgccagcggcggcgcggcggcagcaacctcgtccactgccgcatccgctgcggctacgccattgttcagcccggcgtccagcggcccacgggttcaggtgaaagagggcatcggtccaaaactaccgcggcccaatcgcgtgcgtgttcctacgcgtcgggaactggcctcctacggcatcaagctaccgtcgcagcgggaggcggaacagcgcgcgcggcaggcggagcgcgatccgcattatgatgatgagctgctctcggatgaggaagcggatgctatggagcaggatgaactggctcgccagttcgccgccacccagcatcagcgctacggtcatcgctgggaagacgataacgcgactgatgacgatgaggccgacgccgcggcagaagcggagctggcgcgtcagtttgccgctactcagcagcagcggtacgctaccgagcagccgccgggcgccaacccgttctcgccggcagattatgaattctcgccgatgaaaacgttggtcaatgacggcccgagcgaaccgctgtttacgcccacgccggaagtccagccgcagcagccggcccagcgctatcaacaaccggcggccgctccgcagcagggttatcaacctgcgcagcatcagccgatacaccatcagcctgtgccgccgcagccgcaatcctatccgactgcgtcgcagcccgtacagccgcaacaaccggttgccccgcaggggcatcagcctgccgcccctgcgccgcaggagagcctgatccacccgctgctgatgcgcaatggcgataggcgaccactgcaaaagccgaccacgccactgccgtcgctggatctgcttaccccgccgccgagtgaagtcgagccggtggatacctttgctctcgagcagatggcacgcctggtggaagcgcgactcgccgatttccgcattaaagcggatgtggtgaactactcaccggggccggtgatcacccgcttcgaactgaatctggcgcctggcgttaaggccgcacggatctctaacctgtcacgggacctggcgcgatcgctgtcaacggtcgccgtgcgcgtggtggaggtgatcccgggcaaaccgtatgtcgggcttgagctgccgaataaaaaacgccagaccgtctacctgcgtgaagtgctcgacaacgccaagttccgtgataacccatctccgctcaccgtggtgctgggtaaagacatcgctggcgatccggtagtagccgatctggcgaaaatgccgcatctgctggtggccggtaccaccggttccggtaagtctgttggcgtcaacgccatgatcctcagcatgctctacaaggcgcagccggaagatgtgcgtttcattatgatcgacccgaaaatgctcgagctgtcggtctacgaaggaattccgcacctgctgacggaagtagtcaccgacatgaaagacgccgccaatgcgctgcgctggagcgtcaatgagatggagcgccgctacaagctgatgtcggcgctgggcgtgcgtaacctcgcgggctacaacgagaagatcgccgaagccgcgcgcatgggacgtccgatcccggatccgtactggaagcctggcgacagcatggacgccgtacatccggtgctggaaaaactgccgtacatcgtggtgctggtggatgaattcgccgatctgatgatgaccgtcggcaaaaaggtggaagagctgatcgctcgcctggcgcagaaagcgcgcgcggcggggatccacctggtgctggcgacacagcgtccgtcggtagatgttattaccggcctgattaaggccaacatcccgacgcgcatcgcctttaccgtgtcgagtaaaattgactcacgtaccattctcgatcagggcggcgcggaatcgctgctgggtatgggggatatgctttactccgggccgaactctaccacgccggtgcgtgtccacggggcgtttgtgcgcgaccaggaagtccacgccgtggttcaggactggaaagcccgcggtcgcccgcaatatgtggatggcattacctccgacagcgaaagcgaaggcggcggtggcggcttcgacggcggggaagagctggatccgttgttcgatcaggcagtcaactttgtgaccgagaagcgcaaagcgtcgatttccggggttcagcgtcagttccgcatcggctataaccgtgccgcgcgtattatcgaacagatggaagcgcagggtatcgtcagcgagcagggccataacggtaaccgcgaagtgctggcgccgccgccctttgaatgagtgcaaagttgggtaaataagcgcaaaatcagccaattcttctgtcccgccgccgccggcggtcctacagtaggggcagaagaggctcccgcgtcgggagtgacgcacattaaggaagaacaatgaaaaaactcgcaatcacctgtgcattactgtctggtatggtcgtcagccaggtctgggcagatgcggccagcgacttaaaaagccgtcttgataaagtgagcagcttccatgccagcttcacgcaaaaagtcaccgacggtagcggtaacgccgtgcaggacgggcagggagacctgtgggtgaaacgcccgaacctgtttaactggcatatgacccagccggatgagagcgtcctcgtttcggatggtaaaacgctgtggttctataacccgttcgtcgagcaggccacggcgacctggctgaaagacgccaccagcaacacgccgtttatgctgattgcccgcaaccagtccagcgactggcagcaatataatatcaagcaaaatggcgatgattttgtgctgacgccaaaaagcggcagcggcaacctcaagcagttcacgatcaacgtcggtcgggacggcactatccatcagttcagcgccgtcgagcaggatgatcagcgcagcagctatcagctgaaatcgcagcagaacggcgccgtcgacgcagctaagttcacctttacgccgccgaaaggggtgacggtggacgatcaacgtaagtagaggcgaaagtgagcaatctgtcgctcgatttttccgacaacgcgtttcaacctctggccgctcgcatgcggccagaaaatttagcgcagtatattggccagcagcacctgctggcgccgggtaaacccctgccgcgggccattgaggccgggcacctgcattcgatgatcctctgggggccgccgggtaccggcaagaccactctggcggaagtgattgcccgctacgccagcgccgatgtcgaacggatctcagcggtaacctccggggtgaaagagattcgcgaggctattgagcgcgcgcggcagaatcgcaacgccggccggcggaccatcctgtttgttgacgaagtgcatcgctttaataaaagccagcaggatgcctttctgccgcatattgaagacggtaccattacttttattggcgcgaccaccgaaaacccctcctttgagcttaactcggcgctgctctcccgcgctcgcgtctacttactgaaatcgctcaccaccgacgatatcgagcgggtgcttgaccaggcgatgaacgataaaacccgcggctacggcggccaggatatcgttttgccggatgagacccgcagggccattgccgagctagtgaatggcgacgcgcggcgagcgctgaataccctggaaatgatggccgatatggccgaaagcgatgactcgggcaagcgggtgctgatggcggaactgctgaccgagatcgccggcgagcgaagcgcgcgctttgataataaaggcgaccggttctacgatttgatttccgccctgcataagtcggtgcgcggtagcgcgccggatgcggcactttactggtacgcgcggatcatcaccgccggcggcgatccgctgtacgttgcccgccgctgtctggcgattgcctcggaagatgtcggcaacgccgacccgcgggcgatgcaggtcgccatttcggcgtgggactgctttacccgcgtcgggccggcggaaggcgaacgggcgattgcccaggccattgtctatctggcctgcgcgccgaagagcaacgcggtgtacaccgccttcaaagcggcgctggccgacgcgcgggatcgtcctgactacgacgttccggtgcatctgcgcaatgcgccgacgaagctgatgaaagagatgggctacggccaggagtatcgttacgctcatgacgaacccaacgcctacgccgccggcgagcagtacttcccgcaggaaatggcgcaaacgcgctattatcacccgacaaaccgggggcttgagggtaaaattggcgaaaagctcgcctggctcgctgaacaggatcaaaatagcccgataaaacgctaccgctaattgaggcgttgcggtaaggttattacactatttccgtggtcgtagtctgcggccacttttcttttttaattcgataagcacaggataagcatgctcgatcccaatctgctgcgtaccgagccagacgcagtcgcagaaaaactggcacgccggggctttaagctggatgtagataaacttcgcgcgcttgaagagcgtcgtaaagttctgcaggtgcaaacggaaaacctgcaggcggagcgtaactcccgatcgaaatccattggccaggcgaaagcgcgcggggaagacatcgagccattacgcctggaagttaacaagcttggcgaacaactggatgctgcaaaatccgagctggaaacgctgctggcggaaattcgcgatatcgcgctggcgatcccgaatattcctcatgatgatgtgccggttggtcgcgacgaaaacgacaacgttgaagttagccgctggggtacgccgcgtcagttcgattttgaggtgcgcgatcatgtgacgctgggtgaaatgcacggggggctggattttgccgccgccgttaagctcaccggctcgcgcttcgtggtgatgaaagggcagctggcccgtctgcaccgcgccctggcgcagttcatgctggatctgcacaccgaacagcatggctacagcgaaaactatgtcccgtacctggtaaaccaggataccctgtatggcactggccagctgccgaaattcgctggcgacctgttccatacccgtccgctggaagaagaggctgacagcagcaactacgcgctgatcccgacggcggaagtgccgctgaccaacctggtgcgcgatgaaatcatcgacgaagacgatctgccgatcaaaatgaccgcccatacgccgtgcttccgctctgaagccggttcctatggccgcgacacccgcggtctgatccgtatgcaccagttcgataaagttgaaatggtgcagatcgtccgcccggaagactctatggccgcgctggaagagatgaccggtcacgccgagaaagtgctgcagctgctgggcctgccgtaccgtaaggtcgcgctgtgcaccggcgatatgggcttcagcgcctgcaaaacctatgacctcgaagtatgggttccggcgcaaaacacttatcgtgagatctcctcctgctccaacgtctgggatttccaggcgcgtcgtatgcaggctcgctgccgcagcaagtccgataagaagacccgtctcgttcataccctgaatggttctggcctggcagtaggtcgtacgctggtggcgctgatggaaaactatcagcaggctgatggccgtatcgagatcccggaagtgctgcgcccgtatatgcgcggcctcgaatatatcggctaaacttctcactccttcttttaaaagcgcctgcgggcgctttttttacgcccttattgataccgggcaataatccttgccgcgaatgcagtgatactccctttggattaaaccagcataaaaaactaataatatcgcaaagcattatatatatatctatataacgcttgtcagtttattgtgagcaaccaaagcgagtatccatgaaaattaaagcccctgatgctttactggctgctgaggtaagccgccgtggtctgatgaaaaccacggcaataggcggcctggcgctggccagcaacgcactaacgttaccctttacccgactgtcgcatgctgccgatacgccggcgcccgccagtgagaaggtggtctggagcgcctgcaccgtcaactgcggtagccgttgcccgctgcgcatgcacgtggtggatggcgcgattaaatacgtcgaaaccgataataccggtgacgataactatgacggtttgcaccaggtccgcgcctgcctgcgtgggcgttcaatgcgccgccggatctataatccggaccgtctgaagtacccgatgaagcgcgttggtaaacgcggtgagggcaagttcgagcaaatcagctgggaagaggcgttggataccatcgccagcaatatgcagcggctgattaaagagtacggcaacgaatccatctatctgaactacggcaccggcacgctcggcgggacgctgacccgctcctggccgccggggaaaacgctgattgcccgtctgatgaactgctgcggtggctatctcaaccattatggcgactattcatcagcgcagattgctgccggtctgaattacacctacggcggctgggcggacggcaacagcccatcggatattgaaaacagtcagctggtggtgctgttcggcaataaccccggcgaaacgcggatgagcggcggcggggtgacgtactaccttgaacaggcgcggcagaaatccaatgcccggatgataatcatcgatccgcgctataccgacaccggcaccgggcgtgaagatgaatggatcccgattcgtcctgggaccgatgcggcactggtttcgggcctcgcgtgggtgatgatcaccgagaatctggtcgatcagccgttcctcgataaatactgcgtaggatacgacgagaaaacgctgcccgccggtgcgccagccaatggtcattacaaagcttacattcttggccagggcactgacggtatcgccaaaacgccggagtgggcctcgacaattaccggtattccgcgcgaacgcattgttaaactggcgcgcgaaattgccaccgctaaaccggcctatattagccagggctggggtccgcagcgtcacgccaacggtgagatcgccacccgcgccatctcaatgctcgccattctgacgggtaacgtcgggatcaacggcggcaatagcggggcgcgcgagggctcgtatagtctgccttttgagcgtatgccgacgctggagaatccggttgagaccagtatctcgatgtttatgtggaccgatgcgattgagcgcggcccggaaatgaccgctctgcgcgacggcgtacgcggtaaagataagctcgacgtgccgatcaagatgatctggaactatgcgggcaactgtctgattaaccagcattctgagatcaaccggacccacgaaatcctgcaggacgacaagaaatgcgagatgattgtggtcattgactgccatatgacctcctcggcgaaatacgccgatattctgctgccggactgtaccgcctccgagcagatggatttcgcgctggatgcctcctgcggcaacatgtcctacgttatctttgccgatcaggccatcaagccgcgtttcgaatgcaaaaccatctatgagatgaccagcgaactggcaaagcgtctgggcgtcgaagagcagtttaccgaaggccgtacccaggaaggctggatgcgctatctgtatgagcagtcgcgcaaagcgattcccgacctgccggatttcgacaccttccgtcagcagggcatctataagcagcgcgatccgcaaggtcatcatgtggcctacaaagccttccgtgaggatccgcaggctaatccgctgaccacgccttcgggcaagatcgaaatttactcgcaggatctggcgaaaatcgcggccacctgggagctgccggaaggggatgttatcgatccgctgccgatctacaccccgggtttcgaaaactacaacgatccgctgacagcgaaatacccgctacagctcaccggcttccactataaatctcgcgtccactcgacctacggcaacgtcgatgtgctgaaggccgcctgtcggcaggagatgtggattaacccgatcgatgcccgcaagcgcggcattgccaacggcgatcgtattcgcatcttcaacgatcggggtgaagtgcatatcgaagcaaaggtgacgccgcgcatgatgccgggcgtcgtcgcgctgggggaaggggcctggtacaacccggacgcctcgcgtgtggatcaggcgggcagcatcaacgtgctgaccacccagcgtccgtcgccgctggcgaagggaaacccgtcgcataccaacctcgttcaggttgagaagctgtaaggagtaaccgatgacaactcagtatggattttttattgattccgcccgttgcaccggttgcaaaacctgcgaactggcctgtaaggactacaagaacctgaccccggaggtcagcttccgccgcatctatgaatatgccggcggcgactggcaggaggacaacggcgtctggcagcagaacgtgtttgcctattacctctccatcgcctgtaaccactgtgaagatccggcctgcaccaaggtctgtccgagcggcgcaatgcataagcgcgaagacggttttgtggtggtcaacgaagaggtatgcattggctgccgctactgccatatggcctgcccgtacggcgccccgcagtacaatgccgacaaaggccatatgaccaagtgcgatggctgtcacgagcgcgtcgccgaggggaaaaagccgatctgcgtcgagtcctgcccgctgcgggcgttggatttcgggccgattgccgaactgcgcgctaagcacggccagctggccgcggtagcgccgctgccgtcggcgcactttacccggccgagtatcgttatcaaacctaacgccaatgcccggccgtgtggcgataccaccggttacctggcgaacccgaaggaggtgtgagatgggaaacggatggcatgaatggccgctgatggtctttacggtcttcggccagtgcgtcgtaggcggctttattgttctggcgctggcgctgatgacaggcaagctttcccgtgagcaggagcagcgcgtggtgggcagcatgttcggcctgtgggtattgatggggatcgggtttattgcctcgacgatgcaccttggctcgccgctgcgggcctttaattcgctgaatcgcgtgggagcctcgtcgctgagtaatgaaatagccagcggggcgatcttcttcgccgtcggcggaattggctggctgctggccgtgtgcaaaaagctgcctgccggcctgcggagcctgtggctggtggtgaccatggtgctgggcgtgattttcgtgtggatgatggtgcgggtgtacaacaccatcgacacggtgccgacctggtacaccgtttggacgccgctgagcttcttcctgacgctgtttatcggcggtccactgctgggctacctgctgctgcgcgtcgcgggcgtcgatggttgggcgctgcgcctgctgccggtggttagtttgctggcgctgctggtcagtattatggtggtcgtgatgcagggaagtgaacttgccactatccgcagctcagttcagcaggcctccgccctggtgccggattacgggttgcttatggcctggcgcgtggtgctgctggccctggccctggccctggcctgctggtgcgtgccgcagattcgcggccgcaaaccggcggtctcgctgctcggcctggcctttgttctgatactggcgggagagatgatcggccgcggcgtattctatggcctgcatatgaccgttgggatggctgtcgccagttaaccacctccatcatgccggtgcctaaccaccggcatgatgaaaacgtgctgtcgatagatgaaatttttcaactgaaattaacttcggcatttattaataaactagcaaaaacaatagcgtattatctgttgtctcacctttttccatcctctggataaaaaacttctatcgtagccgacaaaaccgcgtcacgcctgatttcaggtggattgacaatgtttttagcagtggcatgatgcgctcgcgatctgaacattcctcacggtttttacccatgaccatctacacccggccagtgcaaatgctgctctgtggcctgcttttattgaccctggcgatagcggtgctgaatacgctcgtcccgctctggctcgcccatgaaaacatgccaacctggcaggtcggcatggtggggtcatcctattttaccggcaacctggccggtacgttgctggccggctgggtgatcaagcgcctggggtttaaccgtagctattatctcgcatcgttaattttcgccgtcggctgcgtagggctggggatcaccgttggcttctggacatggctgagctggcgttttatcgccggcgtaggttgcgcgatgatctgggtggtggtggaaagcgcgctggtttgcagcggcacttcccgcagtcgcggtcgtctgctggcggcgtacatgatggtctattacgtcggtaccgtactgggccagctgatggtcagtaaattacccaccgatttaatgagcgtcctgccgtgggtgaccggcctggcgctggcggcgatcctgccgttgctgtttacccgcattatggggcaggcagaagagccgcatgaaacggtacgtatctggccgatgctgaagctacgccaggcgcgccacggggtcaatggctgtattatttcggggattgtcctcggctcgctgtatggcctgatgccgctgtggctgaaccatcagggcgtcagcgactccggcatcggcttctggatggcggtgatggtgagtgcggggatccttggccagtggccggtagggcgcctggcagaccgctacggtcgcctgctggtgctgcgggtacaggtctttgtggtcattctgggatgtctggcgatgcttagtcaggcggcaatggccccggcgctgtttgtgcttggggcatctggtttcacgctgtatccggtggcgatggcctgggcctgtgaaaaagtggagcaccatcagctggtggcgatgaatcaggcgctgctgatgagctataccatcggcagcctgctgggcccgaccctgacggcgatgctgatgcagaacttctcagacaacctgctgtttatcatgatcgccagcgtgtcgtttatctatctgctgaccctgctgcgcaaagccgggcatcatccgacgccggtggcgcacgcctgaccctgcaacgcgcagcgcatgctgcgcgtcatctgctgcaatcgcataggcttactgccgcagagaggacaagtcgtttttcatgagaatgaaacggcggggcggacacagcttcccacgccgttgcaggccggcataagcgcatcaccggcccgggcgggattagtacattactttgtgaccatactgctcaaggatgccttttacccgctccatggtctctttcttcggcggatggacgccgtccagcttgtactcttcgcccatcgctacccatttgtgtttacccagctcatggtagggcagcagctcgattttttcgacattgcccatatcgcgggtaaattcgcccaggcggtgcgcggaatcatcatcgtctgaccagccgggaaccaccacgtagcggatccagacattgatattcttcttcgccagatactgggcgaattccagcgtacgatggttagagacgccgaccaggttctggtgaatctcatcgttcatctgcttgagatccagcatcaccaggtctgttacctccagcagctcgtcgataaccggatcgtagcgacgtacgaagccgttggtatccaggcaggtgtggatgccttctttcttacacgcgcggaaccagtcgcgaacaaactccgcctgcaggatcgcctcaccgcccgaggcggtgacgccgccgccggaagcattcataaagtgacgataggtcaccacctctttcattaattcttcaacggtgatttctttgccgccgtgggtatcccaggtgtcacggttatggcagtacaggcagcgcatcaggcagccctggaaaaaggtaataaagcggatgcccgggccatcaacggtgccacaggattcaaaggagtgaatgcgaccaataactgacattgcggtgttttctccagatgtggcccatccggggccgtgttggtgcgcagctcagcggctgcgtcgagtctgttttgacaggtacccaaagtatagataactggcaaagcaggctggggcggggaatgcttgttaaaaaggccccactgatgtggggcctttattgtacgccttttcagtcagacagggaattacatggtctgagtgaaggtacgggtaataacatcctgctgctgttctttggtcagggagttaaaacgtacggcgtagccagatacgcggatggtcagctgcggatatttttccgggttttccatcgcgtcgagcagcatttcgcggttcatgacgttcacgttcaggtgctgaccaccttcgatggacgcttcgtgatggaagtaaccatccatcagacccgccaggttggtcttacgaacttcgtcgtctttacccagcgcgttcggcacgatagagaaggtataagagataccatctttcgcgtaagcaaacggcagtttagcgacggaggtcagagaggctactgcgcctttctggtcacggccgtgcatcgggttagcacctggaccgaacggcgcgccagcgcgacgaccgtctggggtgttaccggttttcttaccgtacaccacgttagaggtgatggtcagaacagactgagtcgggatagcgttgcggtaggtgtgcagtttctgaattttcttcatgaaacgttcaaccaggtcaacggccatgtcatcgacgcgagggtcgttgttaccaaactgcgggtattcgccttcgatttcgaagtcgatagccagaccgtcttcgtcacgaatcggtttaactttcgcatatttgatagcagacagggagtcagcagcaacggacagaccagcgataccacacgccatggtgcggataacgtcacggtcgtgcagcgccatcagagaggcttcgtagctgtacttgtcgtgcatgtagtggatgatgttcagcgcggtgacgtactgtttagccagccagtccatgaagtgatccatgcgatccattacttcgtcgaagttcaggacgtcgcctttgatcggttcagatttcggaccaacctgcattttcagtttttcatccacgccgccgttgatagcgtacagcatggttttcgcgaggttagcgcgagcgccgaagaactgcatttgcttaccaacaaccatcgggcttacgcagcatgcgatagcgtagtcgtcgttgttgaagtccggacgcatcaggtcatcgttctcatactgcagagaagaggtatcgatggacactttagcggcgaatttcttgaagctcagcggcagtttttcagaccacaggatagtaatgttcggctccggagacggccccatggtgtacagggtgttcaggaagcggaagctgtttttggtcaccagagtacggccgtcaacgcccataccgccgatggattccgttgcccaaatcgggtcgccggagaacagttcatcatattccggggtacgcaggaagcgaaccatacgcagtttcatgaccaggtggtcaaccatttcctgcgcgtcttgctcggtgattttacccgcctgcaggtcacgctcgatgtagatatccaggaagctggaggtacgaccgaaggacattgccgcgccgttctgagatttcacggcagccaggtaaccgaagtaggtccactgaatcgcttcctgagcggtggtcgccggaccagagatgtcatagccatatttagcggccatctctttgatctggcccagtgcgcggtgttgttcagcgatttcttcacgcagacggatggtcgcttccaggtcttcgccgctttccagtttcgcttgcagagagttgaactgggcgaatttgtctttcatcaggaagtcgataccgtacagcgcaacgcgacggtagtcaccgatgatacgaccacgaccgtaagcgtccggcagacccgtcagcacgccggatttacggcagcgcaggatgtccggggtatagacgtcgaaaacgccctggttgtgagttttacggtactctgtgaagatttttttcagcatcgggtccagctcgcgattatacgctttgcaggaaccttcaaccattttgataccaccgaacgggatgatcgcacgtttcagcggcgcttcggtctgcagaccaacgattttttccagacctttctcgatatagcccgcgtcgtgagaggtgatggtggaagccagggcagtgtcaaaatcaacaggcgcgtgagtgcggttttcctgttttacaccttccattacggtgtcccacagcttggtggtcgcttcagtcgcgccagccaggaaggattcgtcgccttcatatggggtgtagtttttctgaataaagtcacggacgttgacttcattctgccagtcacctttcgcaaaaccttcccaggctgtggctaacttttcattaagctcggacatgtaacacctaccttcttaagtggattttttatttactgcctgaaacaacccttagtgatggtcgttgccacgcaggtaaatgacccagtatgtcaacccgaccagcagacccccgccgataatgttcccgatagttaccggaatcaggttatcagtgatgaagttcataacggtcaagtgagagaaactttccggagtcgaaccgatggcggtccagaattccgggcttgcaaagttgcggattacgatacccatcgggatcataaacatgttggcgatgctgtgctcaaagccgctggcaacgaacatcgctaccggcaggaccatgatcatcgctttatccatcaggctacgaccggaatagctcatccatacggcgagacaaaccatcaggttagcgaggatacccaggctcacggcctccacaaaagtatggtgcattttgtggtcggcggtctgcagaacgtttagcccccagccgccgttggcagtcatatattcgcctgataaccacatcagcagcacaaacagcagcgcgcccaccaggttaccaaaatagacgttgagccagttttttgccagttgcccccaggtaattcgaccgctggctttggccaccacgatcagtaccgtagaggtaaagaggtcagcgccgcagataacgcacagaatcagacccagagaaaaacagatcccaccgataagtttggcaatcccataaggcatcgcggcagtgccggtggtcgcggtgatatagaatacgaaagcgatggagatgaaaacgccagcggtgatcgccagataaaacgtcttcatcggatgcttcgttgctttatagacacctgcttcttcggcgactttcgccatcgcggcagggagcaaaagatcaaaagggttgtcagctttcacactaactctctctttatataagttggcggtgagatactaacaaagcattatagaagggaaattgatatagatcatatctcaccggaactatatgcctttttagtgtgtggtttttattgaaattatccgtaagctaatgaaatatatagnnnnnnnnnnnnnnnnnnnnnnnnnnnnnnnnnnnnnnnnnnnnnnnnnnnnnnnnnnnnnnnnnnnnnnnnnnnnnnnnnnnnnnnnnnnnnnnnnnnnttgataaatgatgaaatggcgttatttaacattaattaactttacaactacaaattataggaggcgctttctcagggttaaataacggagccgctgagggctccgttgtaagcattaacgatggcgcaagctgggcttattttgcccaaaacgccgctttcgcccgctgcagtttttcataggctttcagcagcgactgatgggccgggaaggcctgcagatcgctatcgaccgcctggagaccatagaacggcgcttccccgctcagcgccgcgctggcggcttcgaccgcgtcggcgccgtacatacggatgaaggcgttcaggtactgcagcggctgacgctcttcttcctggctcagcagcagcagggtttgcagacagcgatagtagttcgcgcgctccgcgctgaagaccgaagcattaaattccatggtccactcggtccagatcagcgcctgttccagatcgccgccggccagggccagcatcgctttcagctcgccgacgcgcagggtataccagccgttgtcttttccggtggcgagccccagcagttcgcgaacgcgggtgaaatcatccagaccctcatcgtccatctgctcgatcagcgccaggtaatcttctttatcccactcgctgcccggcagggacagaatggtgtcccgcagatgagcgcccatgctgttgttcgccagccacaggtcttccgccgggtatatgtccgacatccccgggacgatgatacggcaggcgtaaacgcccaggtgctcgtagtcggcgatgtacacttctttatcttcggccttgaagatggccatcagggtggcgaactcttcttcggtagtaccagagaagctccagtcaacgaatggatagtcggcgtcctgcttgaacatatcccaggagatcaggccgctggagtcgataaagtgggtttcgaggttcgcgtgctcggcgacctcttcgtcatcgaaggttggcggcgtgaagacatcgaggtctttcaggctgcggccctgcagcagttcggtgacggttcgctccagcgccacgccaaagtccgggtgggcgccgaaggaggcgaagcaggtgccgttagccgggttaaacagcacgacgcagataaccggatatttgccgccgagcgagccatcataggcaaagatcgggaaaccttcagcttccagtttggcgatcgattccacgacgcccggatagcgcgccatgacttccgccgggatctccggcaggctgatgctttcagcgatgatgcggtttttaatgtgacgttcaaagacctctgacagaccctgtacccgcgcttcgttgcgggtgttaccggcggacatgccgttggagacgtacaggttgccgacaatattcatcggaatatagacggtttcgccgtcggactggcgggtaaaaggcagaccgcacacgccgcgctcatcgttacccgactgcagatccaccagcatactggccgttaactgatcgtcaggatcgtagaacgcgcgcaggcgggcatccagcagaccttccgggacttcatcatcctcagtcagcgggaaccacttttcgttcgggtagtgaacaaacgggccgttagcgatagtgtcgcctaaccagaagtcggcgaagaaatagttagtggacagacgttcgaaatattcgcccagcgcggaggccagggctgcctttttggtggcgcctttaccattggtaaagcacagcgcgcacgctttatcgcgaatgtgaacggaccacacgtgcggcaccgggttcagccacgaggcctcttcgatatcaaatccgaggtcgagcaatttctgctggaagcgagcgatggaatcttccagggcggcatctttgccgggaataaacgtttgggtcatggcgatcacttttgtcgtacggaaagcgcgcaatgatacggcttttatctgacaggtgctatctccatcatctggctatgcttagaggcatctttaatacacagggagatggaaaatgaaagcctttgactggcagcggatggcgctcgataaagtaccggtggaattcctggcggaggtggcgttgcgcagcctctataccttcgttctggtctttattttcctcaagattaccggacggcgcggcgtgcggcagatgtcgctgttcgaggtgctgattattttgaccctcggctcggcggcgggtgacgtggcgttttatgacgatgtgccgctgctgccggtgctggtggtcttcgttacgctggcgctactgtatcgcggcattatgtggctgatggggcatagcgaaaagctggaggatctactggaggggaaacctatcgtagtggtggaagagggacagttggcctgggagaagctgcatgcggaaaacatgaccgaattcgaattttttatggagctgcgggtcaacagcgtcgagcagcttggccaggtccggctggcaatcctcgaaaccaacgggcagatcagcgtgttttattatcccgatgaagaggtgagggccggattatcgatccttccagcgcattgtaccacacgctataccaccattccgcaagaggggatctatgcctgcgtgcgctgcagcatcgtaatggcgatgcaggcgggagaaaaacgaatatgtccgcgctgcgcaaatgcagaatggtcgaaggccagccgggcgaaacggcttacctgacagcaaatatgtcggttttattacgtcaagccgatagattctgttgtgtgacggcggccgcgttttaccgtcggcgagttttagccattgcggaccttgtcactgaatgataaaaccgatagccacaggaataacttatgcccgcggcggttcgcgggcaaaacaacatagcaacgtggtgaggggaaatggctcaggtctataacttcagttcgggcccggcaatgctgccggcggaagtactcaaactggcgcagcaggaactgtgcgactggcacggtctggggacgtcggtcatggagatcagtcaccgtggtaaggagtttatccaggtggcagaagaggcagaacaggacttccgcgctctgctgaacatcccttccaactataaagttttattctgccacggcggcggccgcggccagttcgccgggatcccgctgaacatcctcggcgataaaaaggtcgctgactatgtggacgccggctactgggcggccagcgcggtcaaagaggcgaagaaatactgcacgccgaacgttatcgacgcgaaaatcaccgtcgacggcaagcgcgctgtgaagccgatgagcgagtggcagctgaccccgggggcggcctatctgcactactgcccgaacgaaaccattgacggtatcgcgattgatgagacgccgaacttcggcgacgacgtcatcgtgaccgccgatttctcctccaccattctttcccgcgaaattgacgtcaaccgcttcggcgtaatctacgccggcgcgcagaagaatatcggtccggctgggctgacgctggtcatcgtgcgtgaagatctgctgggcaaagccagcgtggcctgcccgtcaattcttgactacaccgtgttaagcgagaatgactcgatgtttaacacaccgccgacgttcgcatggtatctggctggactggtgtttaagtggctgaagcagcagggcggggttgccgcgatggataaaatcaaccagcagaaagccgaactgctctacggcgtgatcgataacagcggcttctatcgtaacgatgtggcgcaggccaaccgttcgcgtatgaacgtaccgttccagctggcggacagcgccctggacaaactgttcctcgaagagtcgtttgctgccgggctgcacgcgctgaagggccaccgggtggtgggcggcatgcgtgcttccatctacaacgccatgccgctggacggcgtgaagacgttaaccgactttatgctggacttcgaacgccgccacggttaatcgcctgtttctttcttcctccccgcggcctgtctgcggggtttttattctgtttgtttgagagtgaagtttgatggaatccctgacgttacaacccatcgcacgcgtagagggcaccgtgaacctgccaggttcgaaaagcgtctccaaccgcgcgctgctgctggctgccctggcccgcggcacgacggtgctgaccaacctgctggacagcgacgatgtgcgccatatgctgaatgccctgagtgcgctgggggttcaatataccctgtctgccgaccgcacccgctgcgaagtgaccggcaacggcggcccgttgcgctctgccgcggcgctggagctgttccttggcaacgccggtaccgcgatgcgtccgctggcggcggccctgtgccttggcagcaacgatatcgtgctgaccggcgaaccgcggatgaaagagcgtccgatcggccatctggtggatgccctgcgtcagggcggcgctcagatcgactatctggagcaggaaaattatccaccgctgcgcctgcgcggcggttttcagggcggcaacgtcgaggttgacggcagcgtctccagccagttcctgaccgcgctgctgatgaccgcgccgctggcgccgcaggataccgtcatcgtcattaagggcgatctggtgtcgaaaccctatatcgacattacgctgcacctgatgaaaaccttcggcgttgaggtgggcaatcagtcttatcagcgatttgtggtgcgcggcaagcagcagtatcagtcgccgggagattacctggtggaaggcgatgcttcctcggcctcgtatttcctcgccgctggcgccattaagggcggcacggtaaaagtcaccggtatcggccgcaacagcgtacagggcgacattcgtttcgccgacgtactggagaaaatgggcgccaccgttacctggggcgacgatttcatcgcctgcacccacggcgagctcaaggcggtcgatatggatatgaaccatatcccggacgccgcgatgaccatcgccaccgccgcgctgttcgcgcaagggaccactaccctgcgcaatatctacaactggcgggtcaaggagacggaccgtctgttcgccatggcgaccgagctgcgtaaagtgggcgccgaggtggaagagggggaagattatatccgcatcaccccgccggcaaagttgaagtacgcagaaatcggcacctataacgaccaccggatggcgatgtgcttctcgctggtagcactgtctgatacgccggtgaccatccttgatcccaaatgtacggccaaaacgttccctgactactttgagcagctggcgcggatcagtaccctcgcctgagtaaaactttgtcatcccgcgggctgatgtcctgtcagcccgctataattgcgcaaaacttctgcttttcatttcctgtagtccgtaatttacaagcaatgctcactttccggcgtattgatgcgtataatgcgcggcgtttatattccatgcgccttgctgaaggagaaaaagatgacggcgaatattccggtaatcaccattgatgggcctggcggtgcgggtaaaggtacgttgtgcaaggcaatggcggaagcgctgggctggcatctgttagattcaggcgcgatctaccgcgttctggcgctggcggcgctgcatcatcatgtcgacgtggagtccgaagaggcgctggtgcccctggctgcccatcttgacgtgcgttttatttctactgacggcaacctggaagtggtgctggaaggggaagatgtcagtagcgaaattcgcactcaggaggtcgcgaacgcggcctcgaaagtggcggcttttccgcgcgttcgcgaagcgctgctgcgccgccagcgcgccttccgcgaactgccggggcttatcgccgacggtcgcgatatgggaacggtagttttcccggacgcgccggtgaaaattttcctcgatgcctcggccgatgagcgggcgcatcgccgcatgcggcagttgcaggaaaagggctttgatgttaactttgaacgtcttttgtccgagataaaagagcgtgacgatcgcgaccgaaatcgcgccgtggcgccgcttgtcccggctgccgatgcattagttctcgattcaaccgaactaaacattgagcaagtgattgaaaaagcgctacaatatgcgcgcgaaaaattggccgttgcgtaggccttaaccggtaacgcgccgaagcctccgaattatagcagtaccccgcggcaatggatggtcagcgggtatgtgaaacaaccccatccggcatggagccaggtggacgttaatattaacctgaagattaaacatgactgaatcttttgctcaactgtttgaagaatccttaaaagaaatcgaaacccgcccgggttccatcgttcgtggtgttgttgttgctatcgacaaagacgtagtactggttgacgccggtctgaaatctgagtccgccatcccggctgagcagttcaaaaacgcccagggcgagctggaaatccaggttggtgacgaagttgacgttgctctggatgcagtagaagacggcttcggtgaaactctgctgtcccgtgagaaagctaaacgtcacgaagcttggatcacgctggaaaaagcttacgaagacgctgaaactgttaccggtgttatcaacggcaaagttaaaggtggcttcactgttgagctgaacggtattcgtgcgttcctgccgggttccctggtagacgttcgtccggtgcgcgacacgctgcacctggaaggcaaagagcttgagttcaaagtcatcaagctggaccagaagcgtaacaacgttgttgtttctcgtcgtgccgttatcgaatccgaaaacagcgcagagcgcgatcagctgctggaaaacctgcaggaaggcatggaagtcaaaggtatcgttaagaacctcactgactacggtgcattcgttgatctgggcggcgttgacggcctgctgcacatcaccgatatggcctggaaacgcgttaagcatccgagcgaaatcgtaaacgttggcgacgaaatcactgttaaagtgctgaagttcgaccgcgagcgtacccgtgtatccctgggcctgaaacagctgggcgaagatccgtgggtagctatcgctaaacgttatccggaaggtaccaaactgaccggtcgcgtgaccaacctgaccgactacggctgcttcgttgaaatcgaagagggcgttgaaggcctggttcacgtttccgaaatggattggaccaacaaaaacatccacccgtccaaagttgttaacgttggcgacgttgtggaagtaatggttctggatatcgacgaagagcgtcgtcgtatctccctgggtctgaagcagtgcaaatctaacccatggcagcagttcgcggaaacccacaacaagggcgaccgtgttgaaggtaaaatcaagtctatcactgacttcggtatcttcatcggcctggacggcggcatcgacggcctggttcacctgtctgacatctcctggaacgttgcaggcgaagaagcagttcgtgaatacaaaaaaggcgacgaaatcgcagcagttgttctgcaggttgacgcagagcgtgagcgtatctccctgggcgttaaacagcttgcggaagatccgttcaacaactacgttgctctgaataagaaaggcgctatcgttgttggtaaagtgactgcagttgacgctaaaggcgcaaccgtagaactggctgacggcgtagaaggttacctgcgtgcttctgaagcatcccgtgaccgcgttgaagacgcaactctggttctgagcgttggcgacgaagttgaagcgaaattcaccggcgtggatcgtaagaaccgcgtagtgagcctgtctgtacgtgcgaaagacgaagcggaagaaaaagacgctatcgctaccgtgaacaagcaggaagacgcgaacttctccaacaacgctatggctgaagcgttcaaagcagcgaaaggcgagtaatctttgtcattcaggtaataacaacctgaatagcgacgagtttacttgacagattgcaggattcgtcctgtaatcaagcacaaagggcggctacggccgcccttgtttaagctgttagctaatttttgccttgaaggaaaccggaggaataatgaccaagtcagaattgattgaaagacttgccagccagcaatctcacattccggcgaaagcggtggaagatgctgttaaagaaatgctggaacatatggcctcaacgcttgctcaaggtgagcgcattgaaatccgcggtttcggcagcttttctctgcactatcgagcacctcgcaccggacgtaacccgaaaactggtgataaagtcgaactggaaggtaagtacgttccgcactttaagcccgggaaagaattacgtgaccgcgccaatatttatgaagggtgagttgcacgacgtgcagcctgcctgacgataaagaaagcaccttcgggtgctttttttgtgcccgccatttacggccatcctcacaaaaaaagcgtgcccggctgcaagcgaggcgattgtctggaatgcgccgcgcaagcctgaattcgccgccaggacgccagcaccgctttgcgtaacactgtccactcacagggaggtgtttatgcgtctaccatggcttgccggatgcgccatcattgcaatgctgccgcttctctggctacccgtcttgccgggcccgtacagtctggcgggcgcgagcgcactggcgctggcgctgattcgtctgcatggaagggccgtcgccggagtggcgatgacgcttctgctggtggtctggggagtattgagcgcgcatcaggcgctgtggccgacccggcaccttaccggcgccatccggcaagcggaagtgatccttagcgagacggatggccagaccttgcaccgtggacaaatggtgcgcctgcggggccgctatctgtttcccccggtaggcgtaacgctgtacggggaacttgcacctgcgccagcctgtgcgggtcaacactggctgatgacgctgcgcctgcgcccggtgcacgggcagctcaatgacgggggcttcgacagccagcgctatgcgctggcgcagcaccgaccgctgagcggagggatcgtcgccgcttccgcgctggatgcccgctgcagtctgcgcgcccgctatctgacgtcgctgacccggcgactgcagacttatccctggcgcgcggtgatgttgggattaggaatgggggagcggctgtctctgccgacggagataaaggtcctgatgcagaacacgggcacttcccatctgatggctatctcgggtctgcatatcgctctcgcggcttctcttatcatgctgttgctgcgcggcgtgcagtatattctcccgggacgctggattggctggcggttgccccttgtcgccgggctggcgggcgccgtcggctatgcctggctgaccggtatgcagccgccggccctgcgcacttgcttagggcttgcggtctgttgtgctttacgtttgtcgggtcaacgctggacggcgtggcaggtgtggctctgctgtctgggagcgatactggttgccgacccgctggcggtgctgtcgcaaagcctgtggctatctgccttcgccgtggcggggcttatcttctggttccagtggctcccgttgcctgccggccgctggcgctggccgtggaagaccataattgctcttgttcatttgcaggctggcgtgacgctgctgctgctgccgctgcagttgttgctattccatggagtcagcctgacgtcgatggcggctaatttgctggcggtaccgttagtcaccctgttggcggtgccgcttattctgaccgcgatgctggtgcatctctcggggccggatatagtggagtcgctactctggctggcggccgatcgcgtgctggcgctactgttttggggattacgacgtttaccggacggctggttgacgctggatgctcgctggctgtggatcagtatcctgccgtggctgttggtgatgggctggcgttttcagagctggcggcattcaccggcgctgtgtctcagcgtgctgtttttactgacgcggccattcagccgacaaccgcctgcggacgaatggcgggtgacgatgctggatgtcggacaggggctggcgatggtgatcgagcgtcacggtaaggcattgctttacgataccgggccggcttggccgcagggtgatagcggtcaacaggtgattatcccgtggctgcgctggcaccatctgcagttgcaagggattatgctgagccatgaacatctggatcatcgcggcggccttgattcagtgctgcaggcatggccgcaggcgtgggtgcgcagcccgttaggctgggcgcatcatctgccgtgtcatcgcggtgagcgctggcaatggcagggactcaacttccaggccctgtggccgctaccgggcagcacggcaaagggtaacaatcattcctgtgtggtgcggatcgatgatggtcgctccagcatcctgctcaccggcgatatagaacgtcaggcggagcaggcgatgatcagccgttactggcggcatctgacgtctacacttattcaggttccccaccacggcagcaatacctcctccagcgcgctgctggtccgccgggtggatggcgcggccgcgctggcctccgcttcgcgctacaatgcgtggcggatgccctcgtacaaggtggttcagcgctaccgccagcggggttatcgctggttcgccacgccgcagcaggggcagataacggtggttttttccgcagaagggtggcaaatccatagcttacgggatcaagttttaccgcgttggtatcatcagtggtttggcgcgcccgccgataacgggtagaatatgcggctatttcaacacaagctggtttattgaatgcagaacgataaagatctctccacgtggcagaccttccgccgactttggccgattatcgcgccgtttaaagccgggctaatcgtagcggcggtggcgttggtgcttaacgcgggcagtgacaccttcatgttatcgcttcttaaaccgttattggatgatggttttggtaaaacggatcgctcagtgctgctatggatgccgctggtggttatcggcctgatggtgctgcgtgggatcaccagctacatctcgagctattgtatttcctgggtttccggcaaagtggtgatgaccatgcgtcgtcgcctgttcggccacatgatgggtatgccggtggccttctttgacaagcagtctaccggaacgctgctgtcacgcatcacctatgattctgagcaggtcgcctcctcctcttccagcgcgctgatcaccgtggtccgcgaaggggcatcgattatcggtctgttcgtgatgatgttctattacagctggcagctgtcgctgatcctgatcgtactggcgccgattgtgtcggtggcgatccgcgtggtctccaagcgttttcgcaatatcagtaagaatatgcagaacacgatggggcaggtcaccaccagcgccgagcagatgctgaaagggcacaaagaggtgctgatgtttggcggccaggaagtggaaaccaaacgttttgataaagtcagcaataaaatgcgtctgcaggggatgaagatggtttccgcctcgtctatctccgacccgatcattcagcttatcgcctccctggcgctggcctttgtcctgtatgccgccagcttcccgagcgtgatggacaccctgaccgccgggaccattaccgtggtcttctcctcgatgattgcgctgatgcgtccgctgaagtcgctgaccaacgtcaatgcccagttccagcgcgggatggcggcgtgccagacgctgtttgcgatcctcgattccgagcaggaaaaagacgaaggtacgcgggtcattgagcgggcgaaaggcaatctcaagttcgagaacgtcacctttacctacccgggtcgcgaagtggccgcgctgcgcaatatcaatctcgatatcccggaagggaaaacagtggcgctggtggggcgctcagggtcgggtaaatcgaccattgccagcctgatcacccgcttctacgatgtcgacgaggggcagatcctgctggatggccacgacctgcgcgagtacaagctgagctcgctgcgcgaccaggtggcgctggtttcacaaaacgtgcatctgttcaacgataccgtcgccaacaatatcgcctatgcccgtaccgaagagtacagccgcgagcagattgaagaggccgcgcgcatggcctacgccatggatttcattaacaagatggataatggtctggataccatcatcggcgagaatggcgtgatgctgtccggcggccagcgccagcgtattgctattgcccgcgcgctgctgcgtaacagcccgatcctgatccttgatgaagccacctcggcgctggataccgagtccgagcgtgccattcaggcggcgctggatgagctgcagaaaaaccgtacctcgctggttatcgctcaccgtctgtcgaccattgagcaggctgatgaaatcgtggtggttgaagacgggcggatcgtggagcgcggaacgcaccatgatctgctggagcataagggcgtgtacgcccagctgcataagatgcaattcggcgaatgatcgcgcgcatctggtccggggaatcgccgctgtggcgcctgctgctgccgctctcctggctgtatggcctggtgagcggggtgattcgcctcagctatcagctggggtggcaaaaagcctggcgcgcgccggtgccggtggtggtggttggtaacctgaccgccggcggcaatggcaaaacgccggtggtgatctggctggtggagcagctgcagcagcgcggtattcgcgttggcgtcgtgtctcgcggctacggcggtaaagctgaacgctatccgctggtgttggacgacagaaccagtacggcgctggcgggtgatgaaccggtgttgatccatcagcgtaccggtgccccggtcgctgtcgctccgctacgcagcgacgcggtaaaagcgttgctcagcgcgcacgatctgcagatgattgtgaccgacgatggtttacagcactataagctcgcgcgggacagagaaattgtcgttattgacggcgtgcgccgctttggcaacggctggtggctgcctgccgggccgatgcgcgagcgggcgtcgcgtttgcaaagcgttgatgcggttatcgttaacggcggcgtggcgcgtccgggtgagatcccgatgcggctgcgcccagggatggcggttaacctgcttaccggcgaacgtcgcgatgtctccaccttcacgaacgtagtggcgatggccggcatcggccatccgccgcgcttcttcgccaccctcgaaagctgtggcgtccagccggtcaaaaccgtggcgctggcggaccatcaggcgctgagccaggctgatgtcgccgccctggtgaccgccgatcagacgctgctgatgaccgagaaagatgccgtgaaatgtcgcgatttcgccgctgcaaactggtggtatttaccggtcgacgccataatggccgatgaacgcgcacagcggttgcttgcggacttagcgacgttggcgcaacgttaactgacgcgccggctttgctcgccgctgtgctggaattcctgacggagaacctgcatgtcggtattgcaactatcgcttaacgaggcgcgccacctccatctcgcggcgcaggggttgttaaagaagccccgacgtcgcgctcgcccgaaagacattctttccaccatccagcagatgtcgctgctacaaatcgataccatcaacgtggtggcccgcagcccctacctggtgctgttcagccgtcttggcagctatccgcagcactggctggatgagtcgctgcgcaacggcgagctaatggaatactgggcgcatgaagcctgctttctgccgcgcagcgatttcgccctggtgcgccatcgcatgttgaatcccgacaatatgggctggaaataccatcgcgcatggatggaggagcatgccgggagtattgccgagctggtggcgcatatcgggcaaaacggcccggttcgctcggcggattttacccacccgcgcaaaggcgccagcggctggtgggagtggaaaccgcataagcgccacctggaagggctgtttaccgccggcgaagtgatggtggtggagcggcgcaattttcaccgcgtgtatgatctaacccggcgggtgatgccggactgggacgacgagcgcgacgcgctctcccgcgaagacgcagaggccattatgttgcgcaatagcgcccgtagtctcggcatcttccgcgcccagtggctggccgattactatcgcttgcgccagccggcgctaccgggtctgctggcggcctggcaggaagaggggctggtggtgccggttaacgtggaagcactcggcgagatgtggctgcatcacgaggcgctggcgcagctggagaccgcgcccggcggtaagctgaccgccagccatagcgccgtgctctcgcccttcgacccggtggtctgggatcggaaacgcgctgagcagctgttcaacttcagctatcgcctggagtgttataccccggcgccgaagcgtcagtatggctacttcgtactgcctctgctgcaccagggaaaactggtcgggcggatggacagtaaaatacatcgcaaaagccgggagctggagatcttcgctctgtggctggaggagggggtgaagatcacccgtggtctggagcaggggctgcgccgggcgattaacgacttcgcacgctggcaatcggcagagcggatcctgtgccgacgcctgccggaagggctgtttgtcggccaggagcaggggtgggaaatcgacgccgattgatcccggcgcctgccttcctgtgatatgctgctgagaaatctatccggtccatcaggaggaaacatggatcaccgtttacttgaaatcatcgcctgcccggtctgtaacggcaagctgtattacagtcaggataagcaagaacttatttgcaaacttgatagcctggcgtttccgctgcgcgacggtatcccggtgctgctggagacagaggcgcgtccgctggcgctagaagagagtcactcatgagtttcgtggtcattattcctgcgcgtttcgcctccacgcgcctgccgggaaaaccactgcaggacattaatggtaagccgatgattgtccatgtgctggagcgcgctcgcgaatccggcgcggatcgcattattgtcgccaccgatcacgaagatgtcgcccgggcggttgaagccgccggcggcgaggtctgtatgacccgcgccgaccatcagtccggcaccgaacggctggcggaagtggtggaaaagtgtgcgttcagcgatgacaccattatcgtcaatattcagggcgatgagccgatgatccccccggcgattgtccgccaggtggcggagaatctggctgccagcagcagcggaatggcgacgctggcggtaccgatccatgatgcggaagaggcgtttaatccgaatgcggtcaaagtggtgatggatgccgagggttacgcgctctatttctcccgcgcgactattccctgggatcgcgatcgctttgcccaaacccgcgagaccatcggtgactccctgctgcggcacatcggcatctatggctatcgcgccggctttatccgccgctatgtcagctgggcgccgagcccgctggagcagattgaaatgctcgagcagctgcgagtgctgtggtatggcgagaaaatccatgtcgccgtggcggccgaagtgcccggcaccggcgtggataccccggaggatctggagcgcgtccgcgctgagctgcgttagtcctctgtcccctccttgctggaggggatatccccgtcggtttttcgctttttttacccctttttgatcttatccgatgacaagccaggtgcgggcgctcattatgaaaccagtagtgttcataggggtaatcgacaatggaacagttgcgaaccgaactcagtcatcttcttggcgaaaagctaagccgggtggagtgtgtcagtgaacaagccgctacggcgctgtggttcctgtacgatgcgcagggaaacccgatgccgctgctggcgcgaagtttcaccacgcccggcgtggcgcggcagctggcatggaagatctcgaccctggcgcgtaatggtacggtgcgtatgccggtggtttatggcgtcatgacgcacgaagaacatcccggaccagatgtgctgctgcttgagcgcctgcgcggcgtaccggtggaggcgccgacgcgcaccccggcgcgctgggagcaactgcaggagcaaatcgtcgaggggctgctggcgtggcatcggcaggacagtggcggctgcgtgggaatggtcgacaatacccaggaaaacctatggccgaactggtaccgccagcgggtagagatattgtggagcaccctgaacctgtatcaggacaccggtctcaccatgcaggataagcgccttttgttccgctcccgcgagtgccttccggagctgttccgcgatttcaatgataatgctgtgctggtgcatggcaacttcactctgcgcagcatgctaaaagatccgcgcagcgatcagctgctggcgatggtggggccggggatgatgctgtgggcgccacgcgagtatgaactgttccgccttgctgaaggcggccaggcggaacagctgctgtggcgctacctgcagcaggcgccagtttccgaggcctttgtctggcggcgctggctttatctgctgtgggatgaggtggatagtctggtcaacaccgggcgctttgatcgcgcccgttttgacctcgctgcaaaatcactcctgctctggctcgcctgagctgcctttcagccattgccagacgcgaccaagggtttcatagccgacccggtcgctgtgcatcagccacactggagaaggaatggcccgctcccacggattgagcggcgaggtcaccgccagctgattggccggcgcaggaagcggatccaggccggcatggcgaaagaatatcatcgcccgcggaaggtgtgacgccgaggtgaccagcaggaagggcgcgtcgccgatggcgcgcttcaccgccagcgcttcctcttctgtatctttcggccgaccgagcacaatgatatcgctgcgaggtacgccaaggctctccgccactctcgccccggcttccgccgtgctgacgggattcgttttcgccgccgcgccggtaaagatcattttcgaaccgggattcgcctgccacaggcggatgccctccgtcaggcgcggcaggctgttattgataagattagagcttggcgcccactccggattccaggtatagccgccgcccagcaccaccacgtagttcaccggctgctcgccgcgccaggtggggtaggtatcttcaatcggtttcagcaggctgtcggccacgggctgaaggctcagcagcgtcagcagcagccagccgaggctcacgcatagcttcccggtacgctgaaagcggctgaaccataacagcgcgatcccgataccgatcagcaacagtaaggcgggtagcggcaacagcaggccgccgacgatcttttttagcgtgaaaagcatgccagatggttccttttttaaccatataaccaaagttatgttcggatcttataacagatcgcttcattctcggcgcgggtatgacaaaatagcggttttgtgttggcttgtggagtcactcgtgcaggatcgcaatttcgatgacattgctgaaaagttttcgcgcaatatttacggcaccacaaaaggccagttgcgtcaggcgatcctctggcaggatctggaaccgctgttggcgcagctggggccgggaccgctgagggtgctggatgccggcggcggggaagggcaaacggccatcaaagtcgcgcaactgggccatcacgtgacgctgtgcgatctctccgctgagatggtggctcgcgcccgccaggcggccgccgataaaggtgtgatcgacaacatgcattttgtacaatgcgcggctcaggatattgcgcagcatttggaaagcccggtcgatctggtactgtttcatgcggtgctggagtgggtggcggagccccaggaaatactgcataccctgtggtcgacgctgcgtgctggcggtggactgtcattgatgttctacaatgctaacggcctgttgatgcacaatatggttgccggtaattttgattacgttcaactgggcatgccaaaaaagaaaaaacgcacgctgtcgccggattatccgcgtgaaccacagcaggtttatcactggctggaagagattggctggcagatcgtcagcaaaaccggcgtgcgggtgtttcatgattatctgcgtgaaaaacgccaacagcatgacagctatgcggcgctgctggcgctggagacgcgctactgtcgtcaggagccgtatctcagcctgggccgttatattcatgtcaccgcgcttaagagccaggctcatagccgcagatgcaaggataaagtatgagtgaattttcccagacagtccccgaactggttgcctgggccagaaaaaatgatttttcaatctcgctaccggtcgacagactctcttttctgctggcgatcgccactctgaacggtgaacgactggaaggggaaatgagcgagggtgaactggtggatgcgttccgccacgtcagtgatgcgtttgagcagaccagcgaaaccatcagccagcgcgccaataacgcgatcaacgatttggtgcgccagcgtctgctgaaccgctttaccagcgaaattaccgaaggcaatgcgatctatcgcctgacgccgttggggattgggatcaccgattattatatccgtcagcgcgaattctcgacgctgcgtctctcgatgcagctgtcgatcgtcgccggcgagctgaagcgcgcggcggacgccgcggaagagggcggtgatgaattccactggcatcgcaacgtttttgcgccgctgaagtattccgtagcggaaattttcgacagcatcgacctgacgcagcgcattatggatgagcagcagcagctggtgaaagacgatatcgcgcagttgttgaataaagactggcgcgcggcgatttccagctgtgaactgctgctgtcggaaacctccggcaccctgcgcgaactgcaggatacgctggatgcggcaggggataagctgcaggcgaacctgctgcgcattcaggactcgaccatggcgcgcgacgatctccattttgtcgatcggctggtgttcgatctgcaaagcaagctcgaccgcatcgtcagctggggtcagcaggcgattgacctgtggatcggctacgaccgccatgtgcacaagtttatccgtaccgctatcgatatggataagaaccgcgtcttcgcccagcgtctgcgccagtcggtacagacctattttgatgaaccgtgggcgctaacttacgccaacgccgaccgcctgctggatatgcgcgatgaagagatggccctgcgcgatgaagaggtcaccggcgagctgccggcggacctcgaatttgaagagtttaacgaaattcgcgagcagctggcggcgctgatcgaagcgcagctggcggtctataaagagaaaggaataccgctggatctcggcctggtggcgcgggagttcctggcgcagtatccgcgcgggcgtcacttcgacgtggcgcggatcgtcgtggatcaggcggtacagctgggcgtcgcccaggcagatttcaccggactgccggcaaaatggcagccgattaatgattacggagccaaggtacaggcgcatgtcattgacaaatattgaacaagtgatgccggttaagctggcgcaggcgttggccaatccgttatttccggcgctggacagcgccctgcgcgcgggccgtcatatcggtctcgacgagctggataatcacgcatttttgatggattttcaggattacctggaagagttttacgctcgctataacgtcgagctgatccgcgcgccggagggattcttctacctgcgcccgcggtccaccacgctgatttcgcgctcggtactgtccgagctggatatgatggtgggcaaaattctttgctatctctatctcagcccggagcgcctggcgaacgaagggatttttacccagcaggagctctatgacgagctgctgaccctggccgatgaatccaggctgctgaagctggtgaacaaccgttccaccggttcggatctggaccgccagaagctgcaggaaaaaatgcgggcctcgcttaaccgcttacgccgtctggggatggtgtggtttatgggccacgatagcagcaagtttcgcattaccgaatcggtattccgctttggcgccgatgtgcgcgccggcgacgacccgcgcgaagcgcagcgccgtctgatccgcgacggggaagcgatggccctggaaaatcacctgcagctcaatgatgagaatgaagaaaaccagccggatagcggggaggaagagtaatgattgaacgcggtaagtttcgctcgctaacgctggttaactggaacggcttctttgcccggacctttgatcttgatgaactggtgaccaccctctccgggggaacggcgcgggtaagtccacgaccatggcggccttcgtcacggcgctgatcccggatttaaccctgctgcacttccgtaacaccaccgaagcgggggccaccagcggctcacgcgataaaggcctgcacggtaagctgcgcgccggggtgtgttactcggtactcgatgtgatcaattcccgccaccagcgcgtggtggtcggcgtgcgcctgcagcaggtcgccgggcgcgatcgtaaagtcgatattaaacctttcgccattcagggactgccgacctctatcctgccgacccagctgttgaccgaaacgctgaacgatcgccaggcgcgcgtcgtgagcctcaacgagctgaaagataaactcgaggcgatggaaggggtccagtttaaacagttcaactcgatcaccgaatatcactcgctaatgttcgatctgggcgtggtggcgcgtcgcctgcgttccgcctccgatcgtagcaagtactaccgcctgattgaggcctcgctgtacggcgggatctccagcaccattacccgctcgctgcgcgactacctgctgccggaaaacagcggcgtgcgtaaagcgttccaggatatggaagcggcgctgcgggaaaaccgcatgacgctggaagccattcgcgttacccagtccgaccgcgatctgtttaaacacctgatcagcgaagccaccaactacgtggcggcggactatatgcgtcacgccaacgagaggcgcattcacctggataaggcgctggagtatcgccgcgatctcttcacctcgcgttcgcagctggcggctgagcagtataagcacgtcgacatggcgcgcgaactgcaggagcataacggcgcggagggcgatctggaagccgattaccaggccgccagcgatcacctgaacctggtgcagactgcgctgcgtcagcaggaaaaaatcgagcgctacgaagcggatctcgacgagctgcagatccgtctggaagagcagaatgaagtggtggcggaagccgtcgatcgtcaggaagagaacgaagcccgcgctgaggccgccgagctggaagtggatgagctgaaaagccaactcgccgactatcagcaggcgctcgatgtgcagcagacccgcgccattcagtataaccaggcgctgcaggcgctggagcgcgcgaaggcgctgtgccatctgccggatctgaccccggagagcgccgacgagtggctggaaaccttccaggcgaaagagcaggaagcgacggagaaaatgctgtcgctggaacagaaaatgagcgtggcgcaaaccgcgcacagccagtttgaacaggcttaccagttggtggcggcgattaacggcccgctggcgcgcaatgaagcctgggacgtggcgcgcgaattgctgcgcgacggcgtgaaccagcgccaccaggccgagcaggcgcaggggctgcgcagccgcctcaacgagcttgaacagcgcctgcgcgagcagcaggacgctgagcgtcagctggccgagttctgcaaacgccagggtaaacgctacgatatcgacgatctggaaacgctgcatcaggagctggaagcgcgcatcgcgtcgctggccgacagcgtctccaatgctcaggagcagcgcatggcgctgcgtcaggagctggagcaactgcagtcgcgtacccagacgctgatgcgtcgggcgccggtctggctggcggcgcagaacagccttaaccagctgtgcgagcaaagcggcgagcagtttgcgtccggccaggaggtcaccgaatacctgcagcagctgctggagcgtgaacgagaggctatcgttgaacgtgacgaggtcggcgcccgcaagcgcgccatcgacgaagaaatcgagcgtcttagccagccgggcggttcggaagatccgcgcctcaacgccctggcggaacggttcggcggcgttctgctgtccgagatctacgatgatgttagcctggacgatgcgccgtacttctccgcgctgtacggtccgtcgcgccatgcgatcgtggttccggatctgtcgcgggtagccgagcagcttgaggggctggaagattgcccggaagatctctatctgatcgaaggcgatccgcaatcctttgacgacagcgtattcagcgtcgacgagctggaaaaagcggtggtggtgaagattgccgatcgccagtggcgttattcgcgcttcccgtcgctgccgctgtttggccgcgcggcacgtgaaaaccgcattgaaaccctgcatgccgagcgtgaatcgctgtcagagcgttttgcgaccctgtcgttcgatgtgcagaaaacccagcgcctgcaccaggccttcagccgctttatcggcagccatctggcggtggctttcgaggacgatccggaagaagagatccgcaaactcaacagccgccgcggcgagctggagcgtgcgctgagcgcccatgaaagcgataaccaacagaaccgtgtgcagtacgagcaggcgaaagagggcgtgtcggcgctcaaccgcctgctgccgcgcttgaacctgctggcggatgatacgctggccgaccgcgtggacgagatccaggaacgtctggacgaagcgcaggaggccgcgcgctttattcagcagcacggtaaccagctggcgaagctggagcctattgtttcggtgctgcagagcgatccggagcagtttgagcagctgaaagaagattacgcctatgcgcagcaaacccagcgcgatgcgcgtcagcaggcttttgccctggcggaagttgtgcagcgcagggcccacttcagctactccgattcggcggaaatgctcagcggcaacagcgatctcaacgagaagctgcgccagcgtctggagcaggcggagtccgaacgcagccgcgcgcgcgacgcgatgcgtgcccatgcggcgcagcttagtcagtacaatcaggtgctggcctcgctgaagagctcgtatgacaccaagaaagagctgctcaacgatctgtataaagagttgcaggacattggcgtgcgcgccgacgccggcgcggaagagcgtgctcgcgcgcgtcgcgatgagctgcacatgcagctgagcaataaccgctcccgacgcaatcagctggagaaagcgttgaccttctgcgaagcggaaatggacaacctgacccgtaaactgcgcaagctggagcgcgattactgcgaaatgcgcgagcaggtggtgaccgccaaggcgggctggtgcgcggtgatgcgtctggtgaaagacaacggcgtcgaacgtcgtctgcatcgccgcgagctggcctatctctccgccgatgagctgcgctcaatgtcggataaggcgctgggggcgctgcgtctggcggtcgccgataacgaacatctgcgtgacgtgctgcgtatctcggaagatccgaagcgtccggagcgcaaaattcagttcttcgttgccgtataccagcatctgcgcgagcgtattcgtcaggatattattcgcaccgatgatccggtggaagcgatcgagcagatggagatcgagctcagccgcctgaccgaagagctgaccaaccgtgaacagaagctggcgatcagttcccgcagcgtggccaacattattcgcaaaaccattcagcgcgagcagaaccgtatccggatgctcaaccagggtctgcagagcgtctccttcggccaggtcaacagcgtgcgtctgaacgtcaatgtgcgtgagacccactcgatgctgctcgacgtgctctccgagcagcatgagcagcaccaggatctgtttaacagcaatcgtctgaccttctctgaggcgctggccaagctctatcagcgtctcaacccacagatcgacatggggcagcgtacgccgcaaaccatcggtgaagagctgctcgactaccgcaactatctggagatggaagtggaagttaaccgcggctccgacggctggctgcgcgcggagtccggcgcgctgtctaccggggaagctatcggtaccgggatgtcgattctggtgatggtggtgcagagttgggaagatgaatcccgtcgcctgcgcggcaaggatatctcgccttgccgtctgctgttcctcgatgaagcggcgcgtctcgacgcccgctccatcgccaccctgttcgagctgtgcgaacgtctggagatgcagctgattatcgcagcgccggagaacatcagtccggaaaaaggcactacctataaactggtgcgtaaggtgttcaataatcacgaacatgtgcacgttgtggggctgcgcgggtttgctgcgccgctgccggaagcgctgccgggaacggccgacgcctcgtgacgatgcagctcactactggcgggtaagcgctgaaaagggcaacgttaagttgccctttttgctatccagcttgctatgccagggtggtataatctttaagcttctttacattaggtaaggcaaaagccttttcgtctttatatactgtgttaaagcccacgaatttgtgggcggcaatgtgtgacaacagggggcaagggatgttgcttaagaaacggtatggtcgtccattgtcagcgctcagtctgagcctggcaatggcatttgctccgctgttcaatgtccaggccgcagagcctgaagtcgtaccaggtgatagctccgctacgcctggagagctttccgtcgcgctgtcgcaaagcgacgggcaatcgccggcggtcgcgaagctggccggtgagcagccgctgtcgatggaagccgcggcgaacagtcgcgcccagatcgaagcgctattgccggctggctacaaacccgtctttatgaatccgctggtctcgctatacgccgccagggatatgaaaccgatgtgggaaaaccgcgaggcggtgcaggcgttccagcagcagctggcggagatcgccatcgccggttttcagccgcagtttaccacctgggtcagtctgctgaccgatcctgccgtcagcggcatggcgcgcgatgtggtgttgtctgatgccatgatgggctatctgcactttatcagcggcatccccacccaggggacccgctggttatatagctcgacaccgtacaagatggcgaccccgccgctgtcggtgattaaccagtggcagctggcgctggataatggctccctgccggcgtttatcgccggcctggcgccgcgtcatccgcagtatgaggccatgcaccagtcgctgctggcgctggtggctgattcacgtccatggccgcagatgaccggcagcggctcgctgcgcccgggagaatggagcaatgatatcggcgcgctgcgcgagatcctccagcgtaccgggatgttggaaaattccgccaatatcgttctgcccggcgacgtggtgagtccttcggcgaagaaaaagagcaagcccgcggcgcgcggtgtgtacgatcgccagctggtggagggcgttaagcgctttcaggccatgcaggggctgggggcggatggggtcatcggccaatccacccgtgactggctcaatgtctcatcggcacagcgcgctggcgtgctggcgctgaacattcagcgtctacgtctgctgccaggcaaactatcgaccggtatcatggtgaatattcccgcgttttcgctggtctattaccaggacggcagtcaggtgctggcctcgcgggtgatcgtcggacgtccggaccgcaagacgccgatgatgagcagcgcgctgaacaacgtagtggtcaatccgccgtggaacgtaccgcccaccctggcgcgcaaagatattctgccgaaggtgcgtaataatcctggctatctggagcagcatggctacaccgtgatgcgcggctggaacagtaaagagaccatcgatccttaccgggttgactggtcaaccatcaccgagaacaatttaccgttccgttttcagcaagcgcctggggcacgtaattcactggggcgttacaagtttaatatgccgagttcggatgctatctatctgcacgatacgccgaaccataatctgtttcagaaggatgtccgtgcgctcagttccggctgcgtcagggtcaataaagcctcggagctggccaatatgctgctgcaggacgcgggctggaatgacacgcgcatttccgacgccctgaagcagggggatacgcgctatgtcaatattcggcaaaatataccggtgaatttatattacttaacggcgtttgtggacgctgatggacgtacacaatatcgaacagatatttacaattacgatatcaccgcgcgatccagcgcacaaattctgacgaaagcggaacaattaatcaggtaaatgaagtagttcaatggattttgttgtcctagcactgggtaaaaaagggcgctgcacctctgcagcgcccgattttcctggggtgaggctgccttgacgttggcaataatgcccggtaaggtgcctttcgtgcgccagaagtgcatatacatatcattccgctcaatgcgtagcgcggttagcgcgaacgttctcctttgccgggcaacatctcggtcgtggcgagcgatagcgagctgatcctggcatcgcgcaaagcggaaaaagtatataacgattcattgactgtagacctgattatcatggacaaatttgacgctaatcgccgcagattgctggcgttgggtggcgctgcgctgggtgctgccgccattctccctgcgccggcatttgccaccctctcgaccccccgtccgcgtattttgacgctgaataacctgcataccggtgaatcgctcagggcggagtttttcgatggcagaggctatattcaggatgaattagcaagacttaaccattttttccgtgactatcgcgcgaataaaattaagtccatcgatccaaatctgttcgatcatctttatcggttgcagggactacttggcaccaacaaacctgtccagcttatctctggctatcgttccctcgataccaacgatgagcttcgcgcacgaagccgtggtgtagcgaaacacagctatcacaccaaggggcaggcgatggatttccatattgaaggtatttcgttaagcaatattcgcaaagcggcgttatctatgcgcgcaggtggtgtaggatattacccacgtagtaactttgtgcatattgataccggtcccgtaaggcactggtaacgaaaggagcgtcatgaactatcgtattattccggttaccgcgttcgcgcagaactgttctcttatctggtgcgggcaaacccggctggcggcgctggtcgatcctggcggcgatgctgaacgtatcaaagcggtggtggcggaggctggcgtcacgctgatgcagatcctgctgacgcatggccacctcgatcacgttggcgccgcggctgaactggcgcagcattatggcgtaccggttattggtccggaaaaagaggatgagttctggctggaaggattaccggcgcaaagccggatgttcggcctggaggattgccaaccgctgcgtccggatcgctggctcaatgaaggcgatgtggtcaatgtggggaatgtggcgctgcaggtgctgcactgcccgggccatacgccgggccatgtggtcttttttgatgacgcctcccgactgctgatctccggagacgtgattttcaaaggcggggtgggacgcagcgattttccgcgcggcgaccatgggcagctgattgcggctatcaaggaaaagctgttgccgctgggcgatgatgtgacctttattcccggccatggtccgctgtcgacgctgggtgaggaacgccgtaataacccgtttctgcaggatgagatgccggtctggtaacagacatgacgcgaacacataaaaaaggccgcattcgcggcctttttctttataccgaatactatcgcttacagtacggcgacgatggcttcgcacagcggcgccatattgtcaggcgtcatcccggccacgttgatacgtccggaagctaccgcatagatggcgaactcttcacgcaggcgcagcacctgctctttagtcaggccgctgaatgagaacatgccgttctgctggctgataaagctgaagtcgcggctcgcgcctttctcctgcagggtattgacgaacagcagacgcatacgctggatgcgctggcgcatatcggtcagttcctgctcccagattgcccgcagcgcatcgttgctcagaatggtggcgaccacggaggcgccatgcgcaggcgggttcgagtagttggcgcggatcaccgacttcatctgactgaaggcgcggtctacagtctcttgatccgcggcgaccagagtgcaggcgccgacgcgctcgttgtacaggccaaagtttttcgaataggagctggcgaccagcagctctttatgtagagcagcaaaagcgcgtagcccttcagcatcttcttccagaccgcgggcgaagccctggtaggcgaaatcgaacagcggtagccagcctttttccaccgacagctgcgccagctgctgccactgatcgagcgtcggatcgataccggtcgggttgtggcagcagccgtggaacagtaccacgtcgcccgcctgggcttcgttcaggctggccagcagaccatcaaagtccagcgcgtggttagccgcgtcgtagtatgcgtattcgcgcacttccagcccggcagaagtgaatacgcttttatggttcggccagctcggattacttacccacacacgtttcacgtcggtgtttttggcgaggaagtctgcggcgacacgcagcgcaccggtaccgcccggtgtctgcgcggtgcgggcgcgtttatcagcgataatcgcattgcctttaccgaacagcagctcctgggtgcagcgaccaaattcaggaatgccatcgatgcccagatagtttttagtcgtttcattttccagcagatactgctctgcttttttgacgctggtcagaacgggcgttttaccggtttcatccttgtaaacaccaattccgaggttaattttttcagggcggtcatcggcacgaaacagatcggccagacctaaaatcgggtcggctggggcggcggtaatgttctcaaacatgacgaggttccattgtgattactgaagggaaatccgctatcaggttaacgggagaataacgaattgccaaccgtttgcgacaaaaagcgcgaaggttttcgaaagagacgatctttgtctcacgaatacagaaaagcaggaccgaagtcctgctttgaaggcatatcacgaaggggtgtactgcagattagaactggtaaacgatacccacggccgcctggtcgtcagtggcgacaccagccgctttggtgtaatcgttgtcgtccagctggttgaatttatacgcagcgtagacgttcatgttcttgttaaagtagtaccaggtacccacttcgatgtatttaaccagatccgcatcgccgccggagaagccagcacgcgactgcaggtccttgcctttggtctgtacgtagccgatggacggacgcaggccgaagtcaaactgatactgtacaactgcttcaaagttctgagttttaccggcgaagtggttatcttcttccggagtcatgttgtaagtctgggagtacatgacggccgcatagatgttgttagcgtcatattttgcagaggtcgcccaggcttcggctttgtcgccattgccgtcagctttctgatcgacgctacggttagagctggagtagcctgcagacagtgcgataccgttgtcgaacgcgtaggtggctgcggtgctgaagccgtcgccattctgcttgcgaatcgcacggtcgtggtcgtttttaccctggtactgcagcgcgaagctcagaccgtcaaccagaccgaagaagtcggagttacggtaggttgcgacgccgttggtacgaccggtcatgtagttgtcggtgtagttccagccgtcaccgccccattcaaccagcatatcggttgccgcttcgacgtcgtagatcgcgccgtagttacggccatagtcgaatgaaccgtattcgcccgctttcaggcccgcgaacgccagacgggtttttgtggtctgggaaccttcaacattggacgcgtccatgttgtattcccactggccgtagccgatcagctgatcgttaatctgagtttcgcctttcaggccgatacgggcataggtggtatcgtcgctgctggtgtcgccattggtggtccagacgtgctcgccgaccatttttccatagaagtccagtttgttgccgtttttgttatagatttctgcagcgttggctgcaccggctaccagcagggcagggatcaccactgccagaatattgcgcttcatcattatttattaccctcattaatattttttatatgaacacgtgccactgccgtcaataagttctgtcaataaaaacttacagaaccattgatgagagtttggtgtctgaaggcatctttccatccgcgacaacgtttcgctagccggaaaatgctacgaatatctcatatgagtaacaaaacgaaaaatcatgtaactaaatgtgtatttaacggaactttgtgaacttaatcaaaattccgttccaccggataagggcaaacgccattacttatctatctatatgaattatttatgattaatttggctaagcggcaattcgttcattttgtgtattgaattcgtattctttttattcagtctctgtctttgcaagatgtgcgggtaaaggtcaaaaaatgagcaaatttatcagccattttgctctgttatgaacataaagtgcgatctacatcaccaggatgcaccgaaacagtgcgtaacataattgtgatttccaggccttgatgtttaaggttgttgaattttactaacagtaattgacataaaaaaaaggccagcttgcgctggcctttcagattgatgtcagaaaaatttagaatgtcgcgttgcgcggcgtccgcgggaacggaataacatcgcggacgttctgcacgccggtcacgtaagcgatgaggcgttcgaagcccagaccgaagccggaatgcggcacggtgccgtagcgacgcaggtcgcgataccaccagtagtcttctttgttaagacccatctctgccatacgcgcgtcaagcacgtcgagacgctcttcacgctgggaaccgccgataatctcgccgatgcccggcgccagaacgtccattgccgcgacggttttaccgtcttcgttaaggcgcatatagaacgctttaatgtctttcgggtagtttttcaccaccaccggcgctttgaagtgctcttcggccaggtaacgttcgtgctcagaggagagatccacgccccagtacaccgggttctcgaactgtttgccgcagttttccagaatggtgacggcgtcggtgtaatccacctgagcaaaatcagcggtgataaagcgctgcagacggtcgatagcgtctttatccacgcgctcggcgaagaactgcatgtcgtccgcacgctcttccagtaccgctttgaagacgtacttgagcatcgcttccgccaggccggcaacgtcgttcaggttggcgaaggccacttccggctccagcatccagaattccgccaggtggcggctggtgttggagttctcggcgcggaaggtcgggccgaaggtataaatcttcgacagcgcacaggcgtaggtctcgccgttcagctggccggaaacggtcaggaacgactctttaccgaagaagtctttgtcgaaatcgactttgccctgatcgttacgcggcaggttttccagatccagcgtcgacacgcggaacatttcgccggcgccttcggtatcggaggcggtgatcagcggggtggaaacccagaagaagccctgttcgttgaagaagcggtgcagcgcctgcgccagggtgtgacgcacgcgggctaccgcgccaatcaggttggtgcgcggacgcaggtgcgctacttcacgcagatactcgatgctgtggcgcttggccgccatcgggtaggtgtccgggtcttccacccagccggtcacttccacgctggtcgcctggatctcaaagctttgaccctgaccctgagaagccacgactttaccggtgacaatcaccgagcagccggtggtcagacgcagcacttcctgattgtaattgggcagagaattattaataacggcctgtacaggatcaaagcaggaaccgtcatagacggcgaggaaagaaaagccagctttagaatctcggcgggtacgcacccatccgcggaccgtgacttcgctgtcaacggcaacgcggccctggagtacgtcggctacaggcacaacgctcataataatctctctatgtagtccaataaaaaagtctcttcccccaacagcggggggatatctatgttacctgtcatcttccatcagacaagtagatttcgcacagggaagggtggatttcggaaataaatacccctccggggcgttctttggctcaccatttcgacttttacacgacttactcgataatgaccgtcatttcctgcttcgcattttgcatcgacacgatggtccggaaagacttgatatttcccgaggcaaaaaagagttcacgggttagcgcttcgtattccgccatatcacggacgttgatcacgagcaggaaatcgaagtcgccagtgacatagtagacctgctgcacttgcggacaggtaacgaaacgctgtttatcctcctcaagcagatcgagacgttcattctcaatggtcacctgcaccataatggtgattggtcttcccactttactggcgtccactaagctaacactgcctttaatcacccctgcatcctccagtgcagcgatacgccgattgactgccgaaggagacaggctgatccgatcggcgatctcccgttgcgacaagcgattattacgctgcaagagcgtaagaatttttttatcccatgcgtcaagtttcatcatatatctcgtcctgcaagcctgtgatcaacctcactaatgcaacgttgttgcgtatgaatgataaaacagagtgaaaattgcggcgcgatgggcaactttgcgccaattaaccgccgggcgcagtgtaccatcacaggcagtgggaaagcggtatatcgcgacaaaaagcctctcacattctgacttaaccaatttaaagcgaccgtcctgtctcaggccgcacggatccgtgcacccgtcgtttaggcggaatggtcgcaaataacgttatcgtcgcaggacgatatgaaaatagaggtgcctgaatagtggacacaattaaatttcaacttaacgcccggcggcagccctatggccagggagcagacttgagtctgctgaatgaaagcgtggggaacgaagtgctggcattccatcaaaaatttcctgattaccgggtcacgccgctgcgtaagctggaatttttaagccagcggctggggctgggatcgatccatataaaagatgaagcgcagcgattcggtttgaatgcgtttaaaggattaggcggatcttatgcgatggggaaatatctcgccgctctgcttgagcgagatattaatacgttgagctttgccgagcttaattcaccagtgattaaggcgcgtatcaaggacatcgtatttgtgactgctaccgacggtaaccacggacgtggcgtggcgtgggcggctgagcagcttgggctgcgtgcggtggtgtatatgccaaagggctcgtcaccggtacgcgcgcagaatattcgccggcatggcgccgaatgcacgattactgaactgaactacgacgacacagttcggctggcggccaaaaccgcgcgcgagcagggatgggttctactccaggataccgcctggcagggctacgagcagatccccacatggatcatgcaaggctatatgaccctcgctgttgaaatctggcagcagctggcagaaagcggagcgtcgatgccgacgcatctgtttttacaagccggggtcgggtcgtttgccggtagcatcatgggatatttcatcgaaaagatgcagcagcaggctcccaccatcatcatcgttgagccgcacaaggcgaactgcctgtttcgctcggcaaccattaatgacggactgccgcacagcgtcggcggggatatgtcaaccctgatggccgggcttgcctgtggtgaacctaatatcaccagctggccaatgctccgcgaccatgccacctgttttatttccgccgacgattgtctggcggccaacggcatgcgcctgttggccgctccgcgaccaggtactgacgaaccttttgtctccggggaatccggcgctattggcacaggagtgctttatgcgctgatgactcaaccggcgtatcgcgagcttgccgaatcgctgcgcctgaatgccgatgcacaggttctgttaatcagcacggaaggagatacatcacccgatgtctatgaagacatcgtctggtttggccgtaatggttgagcgctatcgacaataacaagggggccatcttaccttccctacaagccctcggtatgacaagcgttctgactcataacgaaaacatacgcgctttcgcgtcatgcatagagagaacctgaccgatgaatactgaaaatataattatcaataaaggatattccgatcccgcaaagtggcatagcgaagataccgtttgggtccttggcctgttcggtaccgccattggcgctggggtgctgtttctgccgattaatgccggaattggcggcttctggccgctgctgattgtttttgtcctcgcttttcctattacttatctggctcaccgcggtctggcgagattcatttactcttccaatacgccggaaagcagtattaccgatgttattggcgagcattttggcgcgctggcgggaaaagtatttaccgtcatctatttcttcgccgtctataccattctgattatgtatgcggtggctatcaccaacaccgcgcagagctttatcacccaccagttggcaatggccgagcctccccggtcgctggtggccatcgttctgatcctcgggctgatgtttatcgtccgtttcggacagcgtttgataatgcgggtgatgagcaccctggtttatcccttcatcatctcgcttatttttatggcactttttctgattccgcactggaacggcgcaattttgcaaaccgtaagcttcagcgccacgggcgatgggcaggggatcatgttatccctgtggatgaccttcccggtactggtgatgtcgtttaaccactatcccatcatttcgccgatggtggtgcgccagaagcagcgttacggtctggcgctcgctgagggtaaatgtgcgcagatccagcgctacggtatcctgctcatgacggtggtggtgctgttttttgttctcagctgcgtgttaagcctgtcgccgcagcaactggcggaagccaaagcccagaatctgtcgattttgtcctatctggccaatcagtacgatacaccgattattgcctggctatcgccgattatcgcctttgtcgctattactaaatcatttcttggccactacatcggcgcctatgaatcgctgcgcgacctgattctggaggccgccgccgcacgcggtaaaaaaccaggtattcgcctcgtcgacgcggtcatcctggtgtttatggtgcttacctgctggttcgccgcgtacaagaaccccagtatcctcggtattatcgaatgcatcagcggtcccaccggggcggcaattctgctgctgttgcctatgtacgccattcataaattaccggtgcttgccccctggcgcggtaaagcgagcaacgttttcgtcaccctgatcggtcttatcaccgtatctgccattttttacggcatgttccaataaccaccataattagcgagatgttatatgagtcattatctgcagattaacggccaacggcttatcgattccctgtatgcacttggcgaacatggtgcgctgccaggcggcggcgtatgccgcctggcagcgactgccgaagataaagccggcagggactttgttgtagcccgcatgaaggcgctgggcctgagcgtgtcaattgatgctatcggcaatgtcaccggcgtttatcacggcgaggagacgttgccgatggtgatgatggggtcacatatcgataccgtcgccaccggtgggttatacgatggcaactacggcgttatggccggccttgaggtgattgccaccctccaggatgccgggatccgcacccgacgaccgttggcggtaaccttctttactaacgaggagggggtgcgatttcagcccgatatgatgggcagcgtggtgtttgccggcgagtatccgttggcgcaggcgctcgcggcaaaagatctcgacggtatcacgctcgatgaagcgctgcgtaacattggttataaaggcgaacgtcagccgggagatatggcggtagatagctacgttgagctgcatatcgaacagggaccaattcttgataaagagcagattgatattggcgtggttaccggcgtacagggtatttcgtggcaggaatttaccctgagaggcgtatcgaatcatgcgggtactaccccaatgtccatgagacgtgatgccgggctggcggctgcgaaaatcgctgtttttgcccgtgagctggcgctaagccttggtggtaatcaggtagctaccgttggacatttcagcgtgaagcctaatctgatcaacgtcattcccaaccatgtcgtcatgtcagtggatctccgcaataccgataatgcgatcttatgtctggcggagcagcaattagccgaatttgtcgcgaaaacgtcgcaggaagagggcgtggagataaccagccgctcactggtgcgctttaatccggtcatttttgccgatgagatcgtcaatgcggtggaagccgaggcggagcgtcaggcgctcagttaccgacgtttgccaagcggcgccggacacgatgcacaatttatggcgtcggtatgtcccgccgggatgatttttgtcccctgcgtcgatggcattagccataacgtcaaagaacatagcgcagccaaagatctgattgctggcgccaatgtgctgctgcaggtggttttacagcgcgcccagcgtatggactaatgtttacaggagcagagaatgaatcagcaacagctaaagcagcagcttatcgcctggcgtcactatttgcatgcccatccggaaagcgccttcgaagagcagaatacttcacggtttattgccgaaaagctcgaagctatgggcattgaggtgcaccgcgatattggcaaaaccggggtggtggggagattgaaatgcggcgacgggaagggcgttatcgctattcgtgccgatatcgatgccattcaattgaccgaacagggagactggtcttaccgctccatgaccgccgagcggatgcacggctgcggacatgatggtcatacctgcattgcgctgggcacggcgcagttgttattgcagcggcagaattttaacggcacggtctgctttgtttttcagcctgctgaggaacctggctatggcgccagagcgatgatggacgatggcgttattgaacgctttggcatagaggaaatctacggtctgcataatatgccgggtatgaaagccgggactatcgccacgcgagtcggtggcattatggccagtgaagataactttattattcgtattaaagggcagggagcgcatgcggcgcggccgcatatggcgaaagatccgctggtcattgcggcggaaatcatcctggctttgcagacaattgtttcgcgaaatgttgatccgaacgtgccagcggtcatttcctgtactgaactgcacaccgatggcatccgcaatgcgattccgacgcacgtcgaaatcaaaggggatacgcgcagctttgcaccggaggtgcagatgctgctcgaagaacgaatgcgtaccattagcgaagcgatttgcgcgatgcacggtgcgacgtgccagttcagctatacccatgaatttgcgccaacggtgaactggcagcaatgcgttgatgtagcggtcaccgctgcgattaacgtggtaggggctgagaaggtggacggcaacgtcgcacagatgatgatttcggaagattttggcgcttttctgcaaaaaatccccggctgtttcatctttttaggcaacggcgatagttcagatgctcagggcaatacaccgttgcataatgcctgctacgactttaatgatgagatattgctaactggcgcggagtattttgccgaggtcgtcagaacccgtctgccgcaggagtgatattgattggcccgatagcagaatgccgtcgggccatgttttttagcttgcctttttaatcggcggcaggtcgaacgcttcgcgcagggcgcggacgaaggccttatcgtggcagatggttttccccgggctgtcggagagtttcgccaccggcttgccgttacattccaccagcttaatcacgatattgagcggtttaacctgcggcagatcgcaggttaatcgggtgccgatcccaaagctgagcttcacccgcgaggcgaagtggcgatacagatcgacggctttcgccaggtcgagattatcggagaagaccagcactttgctcagcggatcgatacccagcttctgataatgggcgatagctttttctccccattccaccgggtcgccggaatcgtggcgcaacccctgatagcgggtggcgaattccggaccgaaatcgcgcaggaacgcatccatagtgatgcagtcggtcagcgcgatgcccagctggtcgggatactcttccagccaggcggcaagggccgcccgctggctgctggcaaggctggggctgatctgctggtgggcctggaaccactcatgggcctgggtacccatcggggttaaattcagacggcgcgccagatcgtaattgctggtgccgacaaaccatggttcctgctgcagacgccgcacaataccttcctgcacctcgcgtgagaaacgacggcgggtgccgaagtccatcagacggaaggcgctcatgtcgaggtcagcggtcatggtggcgaagtcgcctagcttatgttccagcgtgttgagcgcctgatcgacgcccatctctggtgaacgatagcgatggaccaactcgcttatcaccgccagcagcgggacttcccacatgatggcttcccgccatgggccggtaaggcgaatgttcagcttaccattgtcattgctgaccgttacctggctcgggtcatagcgaaaatcgcgcagccagttgaggtaatcctggcgaaaaaagggaagggtggacagccagcgatattcatcatcccgcagcctcaggtcgcgcatggactccacctgctcgcggatcgcgtcggcatagatgccgagcaggtcgtctccgcggcagcgaaactccgccgccacatgcacatcgccgtagcggtggaagacagcctgctgcatgtgcagcttataggcatccgtatcaagcagcgagtgcagtacaggagaagtgaattgtgtcatggtgcgcagtagcatcctctcactggagcgttccatcgaaaccaacgcggaaaatggaggcggagtatacctttattacccgactctgtcccgcgatggcgagcaatggtgacgctgacggtcatttgcgaggcctagtttaatatattgaacatggatcacaccacaagctttgcgtcgggtcgagggcatttcgtgccgcgagtgttaacaaaatgtagcgatttccgtgtttcacgttgaaaagatgaagattctgcatagcgcgattgacacaacaggaatagactgggacgacactttaccgaagatgctaaaggttttttatgacacaacagccccaagccaaataccgccacgactatcgtgcgccggagtatctgattagcgatatcgatttgacctttgacctggatgccgcaaaaaccgttgttacggccgagagcaaggtctcccgccacgcggctgcgtctgatgtgccattgcgcctggacggcgaagatctgaccctgatcgctctgcaggtgaacggccagccgtggagtgactataaagaagaaaacaatcagctggtgatcggcggcctgccggagcatttcaccctgaccatcttcaatgagatcagcccggcggcgaacaccgcgctggaaggcctgtatcagtcaggcgaagcgctgtgcacccagtgcgaagcggaaggtttccgccatatcacctggtatctggaccgtccggatgtgctagcgcgctttaccaccaaaattatcgccgataaagcgaaatacccgttcctgctttccaacggcaaccgtatggcggaaggggagctggagaacggtcgtcactgggtacagtggcaggatccgttcccgaagccgtgctatctgtttgcgctggtggccggtgattttgacgtcctgcgcgattcattccgcacccgctctggccgcgaagtggcgctggagctgtacgtcgatcgcggcaacctcgatcgcgcgccctgggcgatgacctcgctgaaaaactctatgaagtgggatgaggagcgctttggcctcgagtacgacctcgatatctatatgattgtcgccgtcgacttctttaatatgggtgccatggagaacaaaggactcaacgtctttaactccaaatatgttctggcccgtaccgataccgccaccgataaagactacctcgatattgagcgcgtgattggtcatgaatatttccataactggaccggcaaccgcgtcacctgtcgtgactggttccagctcagcctgaaagaggggctgaccgtgttccgcgatcaggagttcagttccgacctcggctcacgggcggtgaaccgcatcaacaacgtgcgcaccatgcgcgggctgcagtttgccgaagacgccagcccgatggcgcacccgatccgtccggatatggttatcgagatgaacaacttctacaccctgacggtctatgaaaagggtgccgaagtgatccgcatgttgcacaccctgctgggtgaagaaaacttccagaaagggatgcagctgtactttgaacgccatgacggcagcgccgccacctgcgacgatttcgtgcaggcgatggaagatgcctctaacgtcgacctgtcgcacttccgcctctggtacagccagtccggtacgccaatcgtcaccgtgcatgacgactataatccggagaccgagcagtatacgttgaccatcagccagcgtacgccgccgaccgccgagcaggccgagaagcagccgctgcatatcccgtttgccattgagctgtacgataacgagggcaaggtgatccccctgcagaagggtggccacccggtacacccggtgcttaatgtgacccaggccgagcagacgtttgtcttcgataacgtttatttccagccggtgccggcgctgctgtgcgaattttcagcgcctgtgaaactggaatacaagtggagcgatcagcagctgaccttcctgatgcgtcacgcgcggaatgatttctcgcgctgggatgcggcgcagagcctgctggcgacttacatcaagctgaacgtcaaccgccatcagcaggggcagccgctgtcgctgccggtgcacgtagcggatgccttccgcgccatcctgctggatgagaagattgatccggcgctggccgctgagatcttaaccctgccgtcagccaacgaaatcgccgagatgttcgcgattatcgatccgatcgccatcgccgccgtgcgcgaagcgctcacccgcaccctggcgaacgaactggcggacgaattcctcgcggtttataacgccaataagctcgacagctatcgggtggagcacgccgatattggtaaacgtgctctgcgcaatacctgcctgcgctatctggcgtttgcggaaccgacgctgggcgataagctggtggcgacgcagtatcaccaggcagataacatgaccgacgcgctggccgccctgtcggcggcggttgccgctgagttgccgtgccgcgatgcgctgatgcaggagtacgatgacaaatggcatcaggacggtctggtgatggataagtggtttatcctgcagtccaccagcccggcagccaacgtggtggaaaccgtgcgcggtctgctgaaccaccgttcgttcagcatgagcaacccgaaccgtgtgcgctcgttaatcggcgctttcgccagcagcaacccggcggcgttccatgctgaagatggcagcggctatcagttcctggtggagatgctgaccgagcttaaccagcgtaacccgcaggtggcgtcgcgcctgattgagccgttgattcgtctgaagcgttatgatgagaagcgacaggcgctgatgcgcgccgcgctggagcagctgaaggggctggagaatctctctggcgacctgttcgagaaaatcagtaaggcgctggcgtaacggtggcataaccccggattgcggcgcgccttgcgccctgtccgggttacccgttagcgtggtgatgttgtcgggcggcgcgatgcttacccgacctggaatacacggctgatttggcgttggtagcccggctgtgcaacgcgcgagccggggacatgtcggatgacgatatgcccccgttcagacagcagacagttacgccggtcagccatgactaaacaaacgcggcgcacgctcgctgtcgccgcgtttcatcacccgatccagtacttcagcctccagctcggccagcttcgccgaaccggtgcgccgcggtcgcgggatatccacgcttaaatcgaggccaatcttcttctcttcaattaacagcacccgatcggccatggccaccgcttcactgacgtcgtgcgtgaccagcaggaccgtaaagccatgctcctgccacagggagacgatcagctcctgcatctccagacgggtgagggcatccagcgcccccagcggttcgtccagcagcagcaggcgcgggcgatggatcagcgcgcgggccagcgcaacgcgctgcttctgcccacccgacagcgcggccggccactcctgtgcgcggctttcaagtccgacgctggccaacgcctgcagggcggcgtcgcgccaggcgccttttaaccccagccccacgttatcaatcactgttttccacggcagcaggcgcgcatcctgaaacatcatccgggtgtcgtcctggatcgccgccaggggcgtcgcgccagccagcagttcgccggcgtttggtttttccagacctgccaacaggcgcagcagggtacttttgccgccgccgctgcggcctaccaccgccacaaactggccgctgggaatatgcagatccagctcgttaagaatggtgttgtcgccatagcgtttcgtcaccccgttcagcagcagcgggatacctgggttgagacgggcagtgttcatgcgttagcctcctgaagatgatacgccggattccagcgcagccagagccgttccagcagctgggcgcagacgtcggccagtttgccaaggatggcgtaaagaatgatcgccactaccaccacgtcggtttgcagaaattcacgcgcgttcatcgccagataaccgatgccggcattcgccgagatagtttcggcgacaataagcgtcagccacatcagaccaagggcaaaacgcacgccgaccataactgagggcagggcgccgggtaatatcacgtgacggaacagggcgaagccggataagccatagctgcgcgccatctcaaccagcccacggtcaatattgcggatcccgtgccaggtgttgatatagatcgggaacagggtgcccagcgagacaaggaagatcttggcggtctcatcgatgccgaaccacaagatcaccagcgggatcagcgccagatgcgggacattgcgcagcatctggatcgaggtatccagcagacgctcgccccagcgagacaggccgctgatcaggccgagtattagcccgatcgagccgccgatggcgaagccgaccagcgcccgccatgagctgatggccagatgctgccacagctcaccgctggccgagagggtccagaacgctttcaataccccctccggcgagggcagcacccgcgtcgacagccagccgacggacgaggccagctgccagacaatgaccgtccctaccggcagcagccagggggcgaggcgtaacaacaggggatgggttgattttgccatcacggtctcctcagctttgcgctactttacgcggaataaactcgttggcgaccgcttccccctgcaggcgcaggctttgcggctgcgggatggacggcaccgcgacgtcaagcagggggaacagaagctctccgacccggtacgcctcttccagatgcggatagccggaaaagataaagctatcgatacccagcgcggcgtattcattgatccgttcggcaacggtggcggcatcgcccaccagcgcggtcccggcgccgccgcgcgctaaacccacgccagcccacaggttggggctgatttccagcttatcgcgtcgcccgttgtgcagggccgccatcctttgctggccgacggagtcggttctggcgaaagccgcctgggcgcgggcgatcgtctcgtcgtcaagatgggagataaggctgtccgccgcctgccacgcttcctcgttggtttccctgacgatcacgtgcagacggatgccaaaacgcacctggcgaccatgccgggcggctttctctcgcacctgagctattttctctgccacctgggccggcggttctccccaggtaagataaagatcgacctgctcagcggccagctcctgcgccacctcagacgagccgccgaaatagaggggtggacgcggctgctgcagtggcggaaacagcagtttggcgtcgcgaacgcgctgatgcttgccgttaaaggtgacggtttctccctccatcagcttgcgccagatgtgggtaaattcagccgaggcctcatagcgctcggtgtggtcgaggaagacgccgtcgcctgccagttcggcaggatcgctgccggtgaccagattgaacagcgcccggccgtttgacagccggtccagggtcgccgcctgacgcgcggcaaccgtcggcgataccacgcttggcctgagggcgacaaggaatttcagccgctgcgtcaccgggatcattgaggccgcgaccagccacgcatcctcacaagagcgtccggtcgggatcagcacgccggtgaagcccagccgatccgccgtctgcgcgatttgctgcagatagccataatcgaccggacgggcaccctcttcggtacccagataacgaccatcaccatgggtcggtaaaaaccagaacatattcagactcatgatttcgctccttgtgtggcggtgggctgccagatgcgggcccggatatcaactttttttggcaccagcttgttctcgtagaacaggtctgccgtctgctgctggcgagcggcggtttcggcgctcaccggggtaaccgcggtggggggacgatggtccagatagctggcgatcaccgcctccggtaagcccatcgttttcgccagcagcgtaatgctttgcgcgcgttggctgtgggtcagggcatcggcctgagtaaaggtgtcgagtacgccttcaatgaaagcgccattgcgttcagcgtagggccgggaagcaagatagaaggatcccgtctgtttcagatcggttccgtcagtgagtacccgggcgccgccctgcagcagcgcggcggagtagtacggatcccagatggcccatgcgtcgacattgccctgctggaaggcggcgcgcgcatcggcgggggcaaggtaaaccggctgaatatcgctaaatttcagacctgcgagctgcagggcgcgcagcagcagattgtgggagctggagcctttctgaaaagcgacctttttcccttttaactcagcaacgttatgaatcgggctgccctgcgccaccaggatcacctccgccttgggcttgggcggctccgcgccgatatagaccaaatcggcgcctgccgcctgggcaaagataggcggaatatcgccggtactgccgatatcaatgctgccgacgttcagcgcctccagcatctgcggaccggccgggaactcaatccacgagatatgggtttgcggatagcgctgctccagcagctgatggctcttcgccagcaccatgctgacgctgcctttctggtagccgatgcgcagagcgtcaggcgccgccggggcggcgtgacccagcgtagagaatagcagcagtccgcccagagtcagggcgcggagaggattaagcatgctccaccccacgcagagatgttaacgacggcgcacggctgctggggcgatgcagcgcctgccagaaggtctccagggcgtcatcaaggcgccgctgcagattcgcggtaaactgcggcttatgctggtaatcggtcacctggctgtcatcagcgaagacgccatggaggatctcctgggccttgagggcattcagcactggcttcagcgcgtagtccaccgccagcatgtgagcgatggtgccgccggtggccagcggcagcacaattttgccctctagcgctcgctcaggcagcaggtcgagcagcgttttcagcgcgccggagaacgaggctttatacaccggcgtggcgatgatcaggccatcagccccggccagctgttcattgagcgtctgcagcgccgggttgtcaaaacgagcgtacaggaggtcttccggggcaaagttctgcagatgccagtggcagacttcgatatcggcggcggtgagcgtctctctggcgtattccagcaaggcactggaacgggaagggtaacgcgggctgcccgcaagcgtaatgacgcgcatctctctctccttataactaaatgtttgcatttatctataattgataacatttatagtgagtgtgacagagggccattatttccctaaatgatttatccgcggttagatagccgaaaagcgcataatggcgcgcggggtaggtaatcgtttgcgctgatgggggattttttgtcgcaggtcaattccctttccgcaacagatcgcacataatacgcccccggtttgcacaccgggaatccaggagagttcatgtactaccccttcgttcgtaaagccctttttcagctcgatcctgagcgcgctcatgaagttacctttcaacaattacgccgtgtcaccgggacgccgctggaaatgctggttcgccagaaggtaccggccaggcctgtcacctgcatggggctaacctttaaaaacccgctgggtctggcggccgggctggataaaaatggggaatgcattgacgcgctgggcgcgatggggtttggttcgattgagatcggcaccgtgacgccgcgtccgcagccgggcaacgataagccaaggatcttccgtctggttgatgccgagggattgatcaaccgcatgggctttaataaccatggcgtcgataacctggttgagaacgtgaaaaaggcgcattttgacggcgtgctgggtatcaatatcggcaaaaataaagatacgccggttgagcacgggaaagatgattacctgatttgtatggaaaaagtctatccgtacgccgggtatatcgccattaatatctcctcgccgaataccccagggctgcgcacgctgcaatacggcgaagcgctggatgatttactctccggtattaaaaataagcagctcgagctgcagcagaagcatcaaaaatatgtcccggtcgccgtaaagatcgcgccggatcttttgcctgaggaattgatccaggttgccgatagcctcgtgcgtcataatattgatggcgtgattgcaaccaataccaccctcgatcgttccctggttcagggaatgaaacattgcgatgagaccggcgggcttagcggtcgtccattacaattaaaaagcactgaaattatccgtatgctctccgctgagctgaatggccgtttgcctatcatcggcgtgggcggcattgattcggtgattgccgcgcgggaaaagattgccgccggggcatcgctggtgcagatctattctggatttatttttaaaggtccgccgctgattaaagaaattgttacccacatctaatcttttcctcctctgaatcccacccagggctttatttccggccctggttgttttatattccctcactgttgcttatttaaacattttagacttttcttaattttagaaaatattctgcggtaagtcgcaacaactttgcagaggcgtatgaaaggggacagggggaaaaatgcggattaaacctgacgataactggcgttggtattacgatgaagagcacgaccgcatgatgctcgatctggccaatggcatgttatttcgctcgcgcttcgcccggcgcatgctgactccggatgcctttgccccttcgggattttgcgttgatgacgccgcgctctatttctcttttgaagaaaaatgtcgcgatctcgagctatcgaaagagcagcgggcggaattagtccttaacgcgctcaccgccatccgttttctcaaaccgcagatgccgaaaagctggcactttatcgcccatacccatcactggcagccgagcggcggcgacgccgcctgcgtttggctgagcgataccggcgagcaggtgaatttactggtggtggagccgggcgataacgccgcgctctgtctgttggctcagccgggtctcacccttgccggccgcgtcatgcagctgggcgatgtcattaaaatcatgaatgacagactgcagccggcgcagagcgcggtcagctacagtctggggcaggcggtttaaggcgccaggcgtagcgctgttttcggtacacagctgcaggcgagaatagtgccatccccggcaaccgcgtttttctttaacggactcacttctccctcttccagccggatgcggcagctgccgcagatccccgcccgacacgaatagggtacgcgaatgccctgttgttccagttgctccagcagcacctgctggttattgccggtaaactgttgaccctgccattcgatggcaaccgtagcctgctgctgcgcctcgggagccggggtatcgtcgctttcacctgccccgtaggctttcgccgggccgcgggtaaggatttccacttcatctcccacccggatcaccccgctgttgcgggcaatcaggttctggccaaaatcgacatcgccattgtccagcgcggtacgaaaacgctttaaggtttccagcggctccccggcgggatgcttctgaccgcgctccgggctgacggtggtaaaaatgcagcggctgcacggcttagcgacatcaaacaccacctcgccgatgcggatcactttccagctatcttcatcccaggccgccgcgccggtgaccacaaggttagggcgaaactgttctatgcttacgctggccgggcagcgctgttgcagatcgcgcagggaggcctcgttagccagcaggtaagggtagccgtcggcgaaggagagcggcaccgcatcatggcgctttacccggcgggttagctgcggccccagccagcgcagctggacatcgcgcttgaaaaagccgctgagccactggttaacggcggcgggcgcgatgagggcggtaaaatggttgccccagacttcggtcggctcggcctgcgtggcgaaatcgctaaaacgcaccacggcgctgctgccgtccggtgcggtcaggtgaaggccatcatgcagcggcgccggaataaatttcaccatttgcggaaactggcgagcggtaataaaggtcccgtcggtttcggtgaccataaacaggcgatcgaaggccaggccgctgatatcagcaaaggcgtgggtcaggcccatgccgcgcatggatttaacaggatgaataaaaagtcgcgatagcgttaccatacgctgcctccgggttccaaaaataagcctataactttatgacatagggcacatattggctataatgcgcaccaattttctttaagtaaaagtgacgatatgaattctctgtttgccagtacggctcgtgggctggaagagctgttaaaaactgaactggaagggcttggcgcgacggactgccaggtagtccagggcggggtccattttcagggggatacgcgcctgctgtatcaaagcctgatgtggagccggctggcttcgcgcatcatgctgccgctgggcgaatgtcgcgtatacagcgatctggatctgtacctcggcgtacaggccattccgtggacggagatgtttaaccctggcgccaccttcgcggtgcattttagcggcctcaatgacgagatccgtaacagccagtacggcgcgctgaaggttaaagacgccattgtcgacagcttcacccgtaagaatctaccgcgcccgaacgtcgatcgtgagtcgcccgatctgcggatcaacgtctggctgaacaaagagacggcgcacatctcgctggatctgagcggcgaaggcctgcacctgcgcggctatcgcgatggtaccggaatggcgccgatcaaagaaaacctcgcggcggcgatcgtcatgcgctctggctgggtaccgggtacgccgctgctcgatccgatgtgcggctccggtaccctgctgattgaagcggcgatgctggcgaccgaccgcgcgccgggcctgcaccgcggccactggggctttggcggctgggcgcagcacgatgacgccatctggaaagaggtgaaggcggaagcgcaaacccgcgctcgtcagggattggcagcgtatgagtcacgcttctacggctcagacgtcgacgcgcgcgtaatcgagcgcgcgcgccgcaacgcccgccgcgccggcattggcgagctgatcgattttgacgtgaaagacgtcgcccaactgaacaacccgctgccgaaaggcccgtacgggacggtgatcagtaacccgccgtacggcgaacgtctggaaagcgagccagcgctgatcgctctgcacagcctgcttggccggataatgaaaagtcagttcggcggctggaacctgtcggtattcagcgcttcgccggagctgctgagttgcctgcagctgcgtgccgacaagcagtttaaagccaagaacggcccgctggactgcgtgcagaagaattatcacctggcggagagcgaaagcggcaagccggcgatgctggcggaggattttgctaaccgtctgcgtaaaaacctgaagaagtttgaaaaatgggcccgccaggaaggaatcgaatgctatcgcctgtacgatgctgatctaccggaatacaacgtggccattgaccgctatgccgactgggtggtggtccaggagtatgccccgccgaaaaccgtcgacgcgcataaggcgcgccagcgtctgttcgacatcatcgctgcgactatcgccgtactggacatggcgcctaacaagctggtgctgaaaacccgtgaacggcagaaggggaaaaaccagtatcagaagatggcggagaagggcgactttattgaggtacaggagtataacgcgcgcctgtgggtcaacctcaccgactacctggataccggtctgttcctcgaccaccgtatcgcccgtcgcatgctcggccagatgagtaaaggtaaggacttcctgaacctgttctcctataccggcagcgccagcgtccacgcaggcctcggcggtgcgcgatccaccaccacggtggatatgtcacgcacctacctggagtgggcggaacgcaacctgcgtctcaatggcctgaccggccgcgcgcatcgcctgatgcaggcggacgtgctgggttggctgcgggagagcaccgagcagttcgatctgatctttatcgatccgccgaccttttccaactccaaacgaatggaagatgcgtttgacgtccagcgcgatcacattcgcctgatgaccgatctaaaacgtctgctgcgtaaaggcggcaccattatgttctcgaataacaaacgcggtttccgtatggatcatgacgggctggcggcgcttggcctgaaggcgcaagagatttcgcaaaaaacgctgtcgcaggattttgcccgcaaccgtcagatccacaactgctggctgattaccgcagcctgaaaggaataaataatgtcactgattagtatgcacggcgcctggctttccttcagcgatgcgccgctgctggataatgccgagctgcatattgaagataacgaacgcgtctgcctcgtcggacgcaacggcgccggtaaatctaccctgatgaagatcctcaaccgcgaacaggggctggatgacggacgcatcatttatgaacaggacctgatcgtggcgcgtctgcagcaggatccgccgcggaacgttgctggtacggtgtacgattttgtcgccgaagggatcgccgagcaggcggcttatctgaaagcctaccatgacgtgtcgcatcaggtgatgaccgatccgagcgacaaaaatttaaatgaactggcgcgcctgcaggagcagctcgataacctgggactatggcagctggacagccgcattaacgaagtgattgagcagctgggccttgacgccaatgcgcagctggcgtcgctgtccggtggctggctacgtaaagcggcgctgggccgcgccctggtcagtgggccgcgcgtgctgctgctggatgagcccactaaccacctcgatatcgaaaccatcgactggctggaaggtttcctgaaaacctttaaaggcacgattatctttatttcgcatgaccgttcctttatccgcaatatggcgacgcgcattgtcgacctcgatcgtggcaagctggtgacctatccgggaaattacgatcagtatctcctcgataaagaagaagccctgcgggtcgaagaactgcagaatgcagaatttgaccgcaagctggcccaggaagaggtgtggatccgtcagggtatcaaagcgcgccggacccgtaacgaaggccgagtccgcgcgctgaaggcgatgcgccgcgagcgcggtgagcgtcgggaagtgatgggcagcgcgaagatgcaggttgaggaggcttcccgttccggcaaaatcgtctttgagatggaaaacgtcaactatcaggttgacggcaaagtgctggtgaaggatttctccgcacagatccagcgcggcgacaagatcgccctgatcggccccaacggctgcgggaaaaccacgttgctgaagctgatgctcggccagctgcaggccgacagcgggcggatccatgttggcaccaagctggaggtcgcctacttcgaccagcaccgcgcggagttggatccggataaaacggtgatggacaacctggcggaaggcaaacaggaggtaatggttaacggtaaaccacgccatgtgctgggttatctacaggacttcctgttccatccaaaacgagcgatgaccccggtacgtgcgctttccggaggggaacgtaaccgcctgctgctggcccggctgttcctgaaacccagcaatctgctgatccttgatgaaccgactaacgacctcgatgttgaaacgctggagctgctggaagagctgatcgatggctatcaggggaccgtgatgctggtgagccacgatcgtcagtttgtcgacaataccgtgaccgagtgctggatcttcgaaggcggcggtcgtattggccagtacgtcggcggctatcacgacgcccgcggtcagcaggcccagtctttggcgcaaaagcagacggtcgttaaaaaaacgacggaagtcgctcagccaaaagcagaaactgtcaaacgcggcgggaacaaactaagctataacctgcagcgcgagctggaacaactgccgcagaagctggaggctctcgaggccgaactgcagacgctgcaggatcaggttgccgatcccgatttcttcgggcaaccgcacgatcgcacgcagcaggtgctggcgcagctggccgaagcggagcaggcgctggaagcggcctttgaacgctgggaatatctcgaaggattaaagaacggcgcctgagccgaggagttgtcatgtgcgatcatcatcatgctgcgcgacatattctatgtccccaatgtgatttgctggtggctttgccgcagcttgagcatcgccagaaagccgcctgcccgcgctgcggtacaacgttaaccaccacgtgggacgcgcctcgccagcgtcccacggcgtatgcgctggtcgcgctgtttatgctgctgctggccaacctgttcccttttatctatatgaaagtgggcggcatcagtagcgaaatagagctgctggaaattcccaacgtactgtttaccgaggattacgccagtctcgggactttctttttactctttgttcaattagtgccggcgttttgcctggtcaccattttgctgctggttaatcgggtcagaatgcctgccggcctgaagacgttccttgcgcgaattctctttcaactgaaaacctggggcatggcggagatctttcttgccggcgtgctggtgagcttcgtcaagctgatggcctacggtgatatcggcatcggtctgagctttgttccctggtgtatgttttgcctgctgcagttacgtacttttcagtgcgtcgaccgccgctggctatgggatgatattgcccccatgccggccattacccagccgctgaaggtcggggtgaccggtatccgtcaggggctgcgctcctgtgcctgctgtacggcggtgttgccggtcgatcagaccgtctgcccgcgctgtaacagtaaaggaacggcgcggcgcaaaaatagcctgcagtggacgctggcgctgctggtgacgtcatttatcctttatctccctgccaacattatgccgatcatgatcaccgatctgctgggcgataaaatgccatcgaccattatggccggggtgattttactgtggagcgaaggttcttatccggtggcgctggtgatctttatcgccagtattatggtgccgacgctgaagatgatcgctatcgcctggttatgctggaacgccaacggcaacggcgcgcgagattcggagcgcatgcatctgatctatgaggtggtggaatttgttggccgctggtcaatgattgacgtttttgtcatcgccgtgctctctgcgctggtccgcatgggagggttaatgaatatctatccagccatcggcgcggtcatgtttgcgctggtggtggtgatgaccatgttttcagccatgacatttgatccccgtttactgtgggatcgtgagccagattcaagccatgaggaaatacaacaacatggaaaataagagcggagaagcgaaagtgcagaaggtgaagaactggtcaccggtgtggatcttccctatcgtcactgcgctgatcggggcatggatcctgttttatcattacagccatcaggggcctgaggtcacgctgatcaccaccaatgcggaagggattgaagggggaaaaacccggatcaagagccgcagcgtagacgttggggtggtggagagcgcaacgctgaccgacgatctcacccacgtggaaatcaaagcccgcctcaattccgggatgcagaagctgctgcacaacgattccgtcttctgggtggtaaagccgcaggttgggcgcgaggggatcagcggtcttgggacattgttgtccggggcctatattgaactgcagccgggaacgaaaggttcggtgccagcgcagtatccgctactggattctccgccgctggcctcgccggatgccaaggggatccgtattctgctggaaagcagcaaggcgggccagctgtcgccgggcgatccggtgttgttccgcggctatcgcgtggggtcagtggaaaccagcaccttcgacacgcagaaacgtcgtataacttaccagctgttcatcaatgcgccgaacgatcgcctggtgaccaccaacgttcgtttctggaaggacagcgggatcgctgtagatttgacctcggcggggatgcgcgtcgagatgggctcgctgtcgacgctgtttggcggcggggtgagcttcgatattcctgaaggactggacctcggcgagccggtggcgaataaaacggaataccatctgtttgacgatcaaaagagcattcaggattcagtctttaccgagcatatcgattacgtcatgttcttcaaagactcggttcgcggcctgcagccgggcgcgccggtggagttccgcggtatccgtctgggcaccgtcggcaaagtgccgttctttattccggggctgaagcagcgtttgaacgatgactatcgtattccagtggaagtgcgggttgaaccgcaacggctgattaatcagcttggcggcgatccgaatattcgcgcccacattgacgatctgatcaaccgcggactgcgcggctcgctgaaaaccggtaacctggtgaccggcgcgctgtatatcgatctcgacttctatccgaaggcgcccccgcgcgggaaaatacaggagtttaacggctatccgattatcccgaccatcagcggtggactggcacagatccagcagcgtctgatggatgcgctggataagattaataacctgccgattaatccgctgctggagcaggcgaccagtaccctggcgcagagcgagaagacgatgcagcacgtgcagaccacgctggataatctgaataagatcacctccagccagtcaatgcagcagctgcccgccgatatgcagacgacgctgcgtgagctgaaccgtagcatgcagggcttccagcctggctctgcggcctacaataagatggtggccgatatgcagcgtctggatcaggtgctgcgtgagctgcagccggttctgaaaacgctaaatgataagagcaatgcgctggtatttgaggcgaaggataaaaaagatccacagccgaagggagcgaaacaatgaaaaaatggttactggcggcagccgtatgcgtactgacggcgtgcagtagcggcggggaaagcaagacatactatcagctaccggttgtgcagggcggcgcgcagagcgacgccagtcagggggcacgtctgctgtgggtagagcaggtcagcatcccggattatctggcgggtaacggggtggtctatcagaccaccgacgtgcagtatgtgatcgccaataataatctgtgggccagtccgctggatcagcagctgcgcactacgctggtggcaaatctcagccagcagttgcccggctgggtagtgtcgtcccagccgctggggagcgagcaggataccctcaacgttgcggtcaatggctttcatggtcgctatgacgggcgggttatcgttagcggtgagtggctgctgaagcatcagggacagctgattaagcgcccgtttaacatcgtcctcaggcaggaacaggatggttatgacgcgatggtcaagaccctggcgcaggcgtggagccaggaggcggctgccattgccagcgagcttaatcgtctgccataagtaaaattcatcataatgacctgccgcgcggttcacctgggccgcgcggcatttttttttgccaggtcagtttgttaccggcggctacgccgagcgaacaaaaaatgaactcttatataggtcacaaatatgacactggcgtgaattttgcgcattgacgttgccttcttttcgcggtattcgtaacccgtggctgcacaatttgcgaccactgttttcttttccaccagatcaaagaatgagggaaacgaggcatgaagagacaaaaacgagatcgcctggaacgggcacaccaacgcggatatcaggcgggtatcgcgggaagatcgaaagaaatgtgtccataccagagcctgaatcaacgctcatggtggctgggaggctggcgagaagccatggaggacagggtactaacggcctgacactgtctctttaaaaaagaagcctccgcatagcgggggcttcgccttttaatcgctgctgaatgttatcagaaagcggaagtatcctggaacagacccactttcagatcgttcgcggtgtagatcagacgatcgtcaaccagcacttcaccatccgcaagtcccataatcagacgacggttaacaatgcgcttgaagtggatacggtaggtgacttttttcgcggtcggcagaacctgaccggtaaatttcacttcgccaacgcccagcgcgcggcctttgccttcgccgcccagccagccaagatagaacccgaccagctgccacatagcatccaggcccaggcagcccggcatcaccggatcgccgataaagtggcaaccgaagaaccacaggtcaggattgatgtcgagttctgcctcaacataacctttatcgtagttaccaccggtttcggtcattttgatgacgcggtccatcatcagcatgtttggtgccggtaactgcgggcctttcgcgccgaacagttcaccacgaccagaggcaagaagatcttcttttgtataggattcgcgtttatctaccatgttttcagtaagccttattttaagttcgggacgcaggatagctaacacgtgtaagctgaacaagtccgatcagttagaacttgtcccacctaaccagcgtagcggccacggaaaacgatggcgagtctcttgctgggtcgcctgcgctatccgctcctgaatggtttgtcgcagcgtctgtccttcaccgtcccacatcagctgggtcaacatcggcagcgcttcggtaatatcgtcaatggcccagatagcaaactggttgtcggcaacggcctgacgtagctcgtggctcaggctgagatgacgaacgttggcggcagggataatcactccctgtttgccggttaaaccgcgctgctgacagatagtgaagaagccttcaattttctcgttcaggccgccgaccggctgcacgcgaccaaactggtcgacggagccggtgatcgcgatgctctgatttatcggtacgttggccagggcgctgattaaggcgcagagttccgccatggaggcgctgtcgccatccacttcactgtaggactgctcaaaggtcagcgaagcagtgaagggaagctgctgctccagctccagctcggacatcagaaaagcctgcatgatcatcatgcctttcgcatgaatgttaccgcccagctcggctttacgttcgacgtcgataaattcgccatcgccaatgtgcacgacgcagctgatgcgtgaaggttcaccgaacgcgcgtggatgaccggggaattcgatcaccgacagggcgttgatctgcccgacgcattcgccttcggtttcaatcaggatctgttcctgcaggatttcatcctgcatacgctccgccaggtagccttcacgccatacccggcgcgccagcatggtctgcatcgcttcgccggtaatctcctcgccttcgcagaaggcggcagcctcccgcagctggcgggttatccatagcggactgagcggcagggtctcctgatcgccggtatagcgcgttccctcatcgatcagcagaggccaggcatcggctgccgggcccggcagctccagctgctgcgcattctgccatacccactggcaccaggcctttagcgtgtcggcgtcagcaaactgcagagtgtcttcatactcgctatagatcgcctgcgcagccagctccggctccatttcctggaaatcggccagcgattcgcgttcgcccaccaggatgattttcagactcagcggcatggagggaatgctgaccggcagcggacgcgattcatccatagaaagccagtcaaagcgctgacgagtcaccatatttttcagacgcacccacagcagcggttgcgccagcagtgtacgtagcgaaagcacaagcacgccgccgttggcctgatggaccagcccaggctggagggtgattgcaccgttaaactggcgtacgcagccaaacagctgttccgcttctacccaatcggccatcacgaccggggcagtgctggcgaaattatcctcagcgccctgcgccggtgcgagcgtcacctgagcgtcggttacctcatagcggacgccgtaaagcggtgcggcaggctcgtgcagagtccgggtttcagccgccagccattgcagatattccggctcttcaggggctttcaccagcatgaaggaggagactgccggcgtgtacagcagctgctcaagcccatagaacaaacgcggctgcagatcgcccgagagggagggggccggatgggaaagttcagcttgagcaaacagcgcctggtaagcttccagatcaggcgcaaggtcggttcgggtcagtttcgtaatggtcaaagtcgctgttttttagttagatgtaaagcgcgcaattatacctgatgccgcgaccgagcacacggaggattatggttaccctgattattacccggtcgcagacttcacgaataatgatttatattcagcacatcagaaaaaaactgatatcctgaaatgagttacacggtcacattgagatcgcaatgaaatatcaacaactggaaaatcttgaaagcggctggaaatggaaatatctggtaaagaagcaccgggaaggtgagctgattacccgctacattgaggccagcgctgcgcaagctgcggtagatgacttgctgacgctcgagaatgaacctgtgctggtgcatgcctggattgagcagcatatgaatccggcgctgatgaaccgcatgaagcagactatccgcgcgcgacggaaacgtcattttaacgctgagcatcagcatacgcgtaagaagtctatcgaccttgagtttgtcgtttggcagcgtcttgctggcctggcgcagcggcggggcaaaaccttgtctgaaaccatcgtccagctgattgaagatgccgagcacaaagagaaatatgccagcaaaatgtcgagcctgaagcacgatctgcaggtactgttagggaaagaatagccaggtaggatcgtcgacccgcctgctggtggttgccctggccgggggctgcttcacagctctcagccgctaaagtgggcgagagggcataaaaaaaacccgccgaagcgggtttttttatcggttataacttaagccgccggctgagttacaacttctttgtagcctttaacttcgatctctacacgacgatccggagccaggcaatcgatcagggcagcgcgagctttcacgttgtcacaggtgttgccagtaaccgggttggattcacccatgccgcgagcggagattttgccagccgggatgcctttagcaaccaggtagtcaacaacggactgagcacgtttctcagacagctgctggttgtaagcttcggaaccgatgcggtcggtgtagcccagaacaacagcggaaccgtctttcggatccatgttgctcagctgagtgtacagctgatccagagcctgctgaccttccggtttcagggtagctttgttgaagttgaacagaacgtcagacttcagggtgaagtgcttggtagccacttccggagccggagccggagccggagcaacaaccggtgcagcatcttcctgaccgaagcggtaggaaacgcccaggctcagcatgccgttatcaggacgggtacccacggtgcccgcgtcgccgatgttgttaacccactggtattccagacgggtagcgatgtcacgagtaacagcccactctacgccgccagcaaatactggggaaacgccagtgtcgtgttcgctacgggaaacgccggtagaagcgtagttgcctttggagtcagcgcgccaaaccatgccgcccagacgggtgtagatgtccagatcgtcagtgatcgggtaacccagtttagcggtcagctgaacgccctgagctttgaaagcaccgttgtcaacgctgcctttatatgccatacggcccagccagtcataacccatttcgaaaccgaggtacgggttaacctggtaaccaccgaacgcaccagcaccaagctgatcgttacgggtcggaccgttgttgttctggaaaccgttaccgtagaaaccggtgtcgtgatactgggaccaacccagtttaccacctgcataccaggtgttatctttcggagcggcctgcgctacggtagcgaagccagccagtgccactgcaatcgcgatagctgtctttttcattttttgcgcctcattatcatccaaaattcgccatgaagttacaaaagacctcacggttaaatccttcaccgggggcgtgacttgttgttaactatgctgatacatgcagcgtaagccgatcacccctggcgatgtaaagtctacaacttagttcgaaacttacaagtgtgaactctgtcaggcatatgaaaaaaaagggttgtgtacacaatatttaacaaatatggttgattttcgtacacgaaaaaaagacagaaatccccgtgtggcaggcattccgcgaaaaagaccataaaaaacgctgtacctttcccagcggtaaaaaaaattccaggaataatcctaatttcactcaatgatacaaatttgagtgaatttttagcccgctgagttgtctgccgagcgtgccctgatttcgcaccgggcgcatgatgaatcccatcgcggaccctacctgggcagcgttaacgagacgttcgtgttcgtcagcggttaactcctccgccagccagcagataaccacactataattacctgtgcgcagggcacggatcattgagtctatggtatggctgggagagagctggctaatttgcatgaccttggacagcggcagaccggcggactgaacccattcgcggctgagcttttgttgcggcgtgagccacagctgccagcgcgactgttgacccagctgctgtaataaaggtagcagcaataactgcgtcatcatgggttgatcttcacgatagacaatttcactgatcagcccattggtgttctgttcgccagaacgatgagcgtagtggcctgccggagcagaagcctgtgctgaacggtttgcgtgagctgaagtaaacatagtctatcccgcctttagttactgtatgcatatacagtatcttcgccaggggaaaagatcaaccgcaatttgccattttgctgccgggaatttaatcgcttctcgtggttccttatctgtcaaaagaagcccctgcattatccaatccttaacgcgcgctaatggtttcatttctccctgtcgattgctgcaacgcttgcgattttctgaaagcgtctcgcaaaaccgcattctggtgaaaaagtcggcgaaaatcatcttgctgctgcccgggaagtcccttatgttttctcttagcggatccgttaacaacttaagtttaattacatgattaacaaaggaatgatcatgagaaaactagtttgtccgcggctcccgcaatttcaggcctgcgtctcaccgctgggtcaactgcatactcgtccgctctttggcggctacagcctggctattgatgatacggtgtttgcgatggtggccgaggggaacatttatctgaaggcctgcgagcagagcgctgcttatcgggtggaacatcgtaatcctctgttaacgctgcgccgacacggccgcatagtgccgctgaagtattatcaaattgacgacactttatggcgcgatgagcagcagctttttcggctatcgctactgtcgtggcagagtgcgcagcgcgaaaagaactaccgacgggcgtcgggccgcctgaaggatttacctaatatcagctttcatatggaattgcagctgattcacgcgggcataccggacgttaggacgttgcgggaagttggtgcgcaggaggcatggttgaggctacgcgtaaataatgcttctttatcgctgagcgtattgctggcgctggagggggcgattgccggggtacatgccgccgcgctcccgacgccacggcgtcaggagcttctcgaatgggcggctacccggtagcggaaaagccttgttattcggtttgggcgtggacccgttgctgcaggcggcagatttcaggcagcagcgccagcagcaggccaatctgctgtaagaccaagggttccttactgtccgcgcgcggttccagatgatggatccggctttgcaggctgttcaaagcctgttgcacccgctgttcatccgcgggggtatggtgcaaggcgtcatccacataacagactgcatcatccagcagggcgaggatttccggcgtggacagtttttcccgatgcgcgccaagagcggagatgtagctggtgaacgtgtggttaaggcatagcagacgaaaggcggtttctcgctgggtggcatccgcgcgtggttcagtcgataagttcgagacgacggaggccagctcagcatcacggttgtaggcgtcacgacgcgcgacacggtaggccagccggttgtcgcggccctgatgatactgctccagaatcgcgtccagatagcggcagttcgcgttcattgcccggtccagcacccgcggcaggttgcggaatttccagtccggccagatgaagctgacagctgcccaggcgatggcgcagccgatcagcgtatcaatgatacgcggcagcgcgacttcaaagccctcgccaagcaggttaaagcacagcagcaccagcagcgtaataaacatcgtggcatgggcgtactgcacgttacggaaggcaaaaaacagcacgccggtcaggacgatcaacagcagttgtccttcaacagagggaaccagcagcaggaccggcaggccgatcgccaccccaaccagcgtgccgataatcctcagcgccaggcgatggcgggtggcgttatagttcggctgacagacgaacaggctggttagcaggatccagtagccatgctggagtccggtaaactggataaaggcatagccggcgcagagcaccaacgacatacgtactgcgtggcggaaaagggccgactctggcgacatattgcgctgcaggcgcagccagatatcgctcagaccgccaagtctgtcgtcggccagcagcgtctcggtattactcccggcaggcgcggtggtttgcaccgattcaatggtggccagctgagcatcgatagcgcgcaggttattcagtaaataccctagggcgttgagctgctcgtcggatgcgccgccggcgcgcacgcgctcaagtgccgcatcgagatgcatgaacgcccgttcaaaatgggcatcatgctgatagggttcgcgtaacagaatcgcccgcgacagtttctggcaggcctgcgcctgcatcgaaagcattcgctggaaacggaacatcacatcgctatagcgaaattgatcgcgtagggtttgatactgaatatgcgatgagctggcgcgttcatgaatatcctgggccacaaagtagtactgcagggtgcggcgggtgccgcgctggccccgatcgcctcgcagtcgggttagcagcgagaccttggtttggttaagcgtagctaccagctggccattagcgagcgccagatcgtacagcggcgcctggctctcatcctcaaggtcaggatcaaacagccgggatttgagctcaagatagcgggccagttgctcatagctacgcgccaggttgtcctgcaatggacgaatcggaaagatcaggtgcccggacagcgtcagcaggttgtaccacacggcccccgccagcaggaacaacggctgcagataccaatgatcgtacagcgtgacgccgagcatggtgtagatggcgataagcagggcgccgaaggcaatggtcgcatagcgctgaccgaggccgccaagcaaaataaagccgatggtagacacggttaaaccaagggcaaacagcggcggccacggaaacagcagctccacggaggcggaggcgataaaaaagcaaaccagagtaatggcaagattacgcagacggccagccagacggtcgtcaaggtcggtcagagccgcagccacgacgccgagggtgagggggatggtcagtttgacttcgccgatccaccagggaaacagcgttgtgccgcagagcgcgataaaaattcgtacgttataaagccaggcgctgttccaggtgtagcggcgtagcagggggctaatcatgtccgtgttccgttcggttactgaaagcgacgacgcgcattggcttcacgcgcagcacgcgcggtttccacagaaacgacccggcgacccaccggccagagggcgatggcggcgattttgaaattcgcgatccccaccgggatgcctatgatagtcaggcactgagctataccgctgaaaatgtgcatcaggcagagccaccagccgaaaaaaatgaaccacagaatgttcagaacggtaccgccggcgttcagtagaccgtttttgcgccccggctcgagctcgtcaacatgaatcgcctcgttaccgtagggaaataacgaaaggcgagtgatttcccagcaggaacgagtcagcggcagcgtgacaatcagaatgatgctgaccagggtggcgagtagccagcctagagtggtggcgaaaccgccaaggataaagttcaaaatattcagaatggtacgcataaagcctcggttttgcccggtggataataagacctgatgattgtaacgtttttttgcgctggagcacctggtccggggcggttaaactgaaaaacaatccaccctgattgaaaatcgacattatatggaacttaaagcgacaacattgggcaaacgcatggctcagcacccttatgatcgggtgcagctactgaacgccggggtaaaagtttccggcgatcgtcatgagtatcttatccctttcaatcagttattgtcagtgcattgtaagcgcggtctggtctggggcgaactggagtttgtgctaccggacgggaaagtcgtgcgtttgcacggtaccgagtggagcgaaacgcagcgcttttatcatcatttacatacgctctggcagcagtggagcacggagatgagcgatatcgccgccggcgtgctgaagcagcagctggcgacgatcgagcacactcgcgcagaaggcaagtggctaacccgtcagcaggtggcggatgttcaggataatatacgccatgcgttgactggtttgccgatgcccaccagtcggcttgatgcctttgataactgccgggagctgtggcgggagtgtcagcgctggttaggcgatattgaagcgacgcgtctggcccataaccaggcctttaccgaggcgatgctggagcaatatcgcgaattttttgatagcgttgagtcgtccccgctcaatgcgtcacaagcgcgtgcggtagtgaacggcgagcgctccctgctggtgctggcgggagcgggcagcggtaaaacctcggtgctggtggcgcgagcgggctggctgctggcgcggggagaagccgcggcagatcaaattttgctgctggcattcggccgccaggcggcgcaggaaatggatgagcggatccgcgagcgtctggcatcagatgatattaccgcgcgtactttccattcgctggcgttgcatattattcagcagggcagcaaaaaagtgcccactatcagtaagctggaaagcgatactgcggcccgccacgcattgctgctgaaaagctggcaaaagcagtgccaggagaaaaaagcgcaggcgaaaggttggcgcctgtggctggaagaagagatgggctggcaactgccggagggggacttctggcaggacaaaaaggtgcagcggcggatggccagccggcttgaccgctgggtgagcctgatgcgcatgcacggcgactcccaggcggagatgattgccggggcgccggaagcggtacgcgacctgttcagtaaacgggtgaagctgatgtcgcctctgatgaaagactggaaagcggcgctcaaggccgagaatgcggtcgatttttccggcctgatccatcaggcggtcaatattctcgataaaggccgcttcgtcagcccatggaaacacattctggtggatgaatttcaagatatttcgccgcagcgagcctcgctgttggccgcgttacgccggcagaatagccaaaccacgctctttgccgtcggggatgactggcaggcgatctaccggttcagcggggcgcagctttctctgaccaccgcattcaaccactactttggcgaaggggattgctgtgcgctggataccacctatcgctttaacgggcgtatcggcgaaatagccaatggctttatccagcaaaatccgcatcagttaagcaaaccgctgaacagccttatggcaggtgataaaaaggccgtcacgctgttagccgacgacaagctggacgatcttctggataagctgagcggttacgttaagcccgagcagcgcatcctgctgcttgcccgttatcaccatctgaagcctgaggcgctcaacaaagcggcgacgcgctggccgcacctgcagcttgattttatgacgattcatgccagcaaaggtcagcaggctgactttgtcattgtgttgggactacaggatggggaggatgcgtttccggccccggcgcgcgagtcgattatggagcaggcgctcctgccgcagccggaagattttccggatgcggaggagcgtagactgttgtacgtggcgctcacccgcgctcgtcaccgggtatggctgttatttaacaaggcgcaaccttcgccgtttgtcgagatcctgcaggcgctggatgtgcccatggccaggaagccgtaatcgcggctcgattatttcaggcgctcggcaagatagcgtggataatccgggatcagaatatcgagcggttgaccgaagtgcggcgactggataataaagtcagcggtggagacgttagtggcgaccggaatgttccagacggtggccaggcgcagcaacgctttgacatccgggtcgtggggaacggcgttcagcggatcccagaagaagatcagcacgtcgattttgccttctgaaatgagggcacccacctgctggtcgccgcccatcggaccgctcagcatggcattaacctccaggccggtagcccgggagacgagattaccggtagtgccggtagcatacaaaatatgttgcgccagcagcgcctgatggcgagcaacccatttcatcagcatatctttgcagtgatcgtgagccaccagcgcgatatgtttttgcgcaggcagggtacgtgttgtcagttccatattttcattccacattttgacctgcaaacagattactgaatgtggctgtcgctgcaagcatcggggatgaaaattttgctgaatctgtgggttaggctggatggccccctgctgcggattagcatacacttaagtgaaatagcaggaggaaaccatgaaagagaatgatattgctggcatcctgacctcgacacggacgattgcgctggtcggagccagcgacaagcctgaccgtccgagctaccgggtcatgaagtatctgctggatcaggggtatcacgttatcccggtttcgccgaaggtggcgggcaagacgctgctgggacaacaggggtatgcgacgctcgccgacgttccggaaaaggtcgacatggttgatgtcttccgtaattcagaagcggcgtggggtgtagcgcaggaggcgatagccatcggcgcgaaaacgctatggctgcagctgggggtgatcaatgagcaggctgcggtgctggccagggaagccggattgaacgtggtgatggatcgttgcccggccattgagctaccgcgactgggattagcaaaataacaaaaaaccccgcctggcggggttttgttttagttgcgaaggcgcggagcctgcagctgctgacgaatcgttttggccagttcgtcgagggacggctgttccgggtgttcgtcgcgggtttcgctgctcagctgcgcttctgccagataggtgtgaatcggctggccatcatcatcttccatcaccacatggtaccagggcgccgcgcgcaattcgtcattggcggcaatttcatcctcttccggctccgcgagcgaatactcgggatcgacatcgacgatgacgcccaggtagcccaagagcgtatggcggacctgttggccgataccgaatttgctggctatcataggcacctcctgggaaacatgaatactccctatatgaggctcatgtttcgtttttcaagttacatgacgcgacaggcaaaccccttcagatacagcccttccgggtaggttgcgatcaccgggtggtcggcagcctgacggaactgttctataaattgtacatcacgcccggcatcaattgcggcatcggcgatgattttctgaaataaatcggtggtcatcagcccggagcaggagaatgtcagcagcacgccgccggggttcagcagctggatcgccagcatattgatatctttatagccgcggcaggcgcccatcagctggcttttattttccacgaacttcggcggatccatcacgatcacgtcgaatttctctccctgatcgcggtatttacgcagcagtttgaacacgtcgtcgcgcacaaactccgctttggacagatccagtccgttgatctccacgttctggcgggcaacgtcgagcgcctcctgagaggtatccacgctggtgacctggcggcagccgcccatcagcgccgacaccgcaaagccgccggtgtaggagaagcagttcagcacccgtttatccgcgacatagcggcgggtggccaggcggctgtcgcgctggtcgaggtagtagccggtcttgtgcccgccctggatatcgactaacagcttcatgccgtgctcggtgatcggcagcagcgccgggggcagttcgcccaccaccggcccctgggccagctccagtccctcttttttacgcacggcgacatcgctgcgatcgtaaatggcgcagtccgggaacaggttctgcagggcgctgatgatggcggcgcgctggtattcggcgcctgcgctgagcagctgcagcacgaaaaagttgccaaagcggtcgatagtgacgcccggcaggccatcggactcgccggcgatcaggcggtagctgtcgaggccatcgcgctcggccagccaggcacgccaggtttgcgcctgctgcagacggcgttcaaagaaggcgctatcgatggcttcattgcggtcgaaggtccacacgcgggcgcggatctgcgacgacggcgagtaagcgccgcgggccagccattttccctgatggtcaacgatatcgatggtttcaccgctgcgggctttaccttccatgcgggcgacgccgccggagaatatccacggatggcgacgcagcagggatttctcgcgtcctttggctaacactaagcgggggaatagggaatctgtcatggggctacctttaagcaacgggaatgtcggcaccgaaaaatggcgcgtagattagcacacctggcgcacgcaagcatctttcgcccggctggcacaggtgagcgtttcggcacaaaatgcaggcgcttcggcacattcagctggtgcggactctcataccctgttttctcaccccaacgaggagcagacgatgaaaaaagatatccgcatggctgtggcgatggtagcggctgtgagcagcggcgcgatggccgcgccgtttagcgtaagcagcaatgatatgcgtgacgggcagccgctggcccagcagcactggtttgccggtttcggctgtaccggaggcaatgtctctccgcagctggcatggaaaaacgccccggcgggcacgcgcagcttcgcggtcaccgtccgggatcccgatgcgcctaccggcagcggctggtggcactggacggtggtcaatatcgccagcagcgtcttttcgctgcccgctggcgcgggagataaaaacagcgctacactgccgggcggagcggtccagggccgcaacgattttggctatgccggcttcggcggcgcctgtccgccggcgggagataaaccgcaccgctatcgctttacggtatgggcgctggatgtccccacgctgccggtggatgccggggccagcggggcgctggtcggctatctgttacatagccatgctctcgccagcgcacagttgacggcgatggccgggcgttaaaataaaaggtcggtctgatggagagtatccactttcagcataacgccttaaccgcggcggagatcaccacccgacggctatgcagactgcatcgcgtgcggctgttctccccggcgctctgtcgggtgaaacgcggcagcaaagtgattgtgcaaggggagagccgggtgctggcgactccgcaacagctgattgttttgccagctgacgtggaactggaggtgattaaccagccggagaatggcctattttgctccgatctgctatcgctgacgcccgagctgctgacgaggtttaagactcgttatctcagcgaaccaccgccagggcgcctgacctcgctctgcgcaccggtgacgacagagctggcgtttatgtggcaaagcgttctgcaggcggtgcgggagggattgtccgtcgcgctgcagcagcaccagaccatggggctgctgctggccctgcatgaggctggctatgcgggcccgctgctcgtcgagcggcagcaggatctgtcggcgcaggtgcggcagctgattatgctgtcgccggcgcaggcatggagcgtgtcgcgggtggcgaaaatgctctttctcggcgagtccacgctgcgccgtcggctgcagcaggaatcgcagagttttcgccagatcgtcgaggaggtgcggatggcccacgccctggggcagctgcagaccacctcgcggccaataggcgaaattgcgcagaacagcggatatcagtcgggatcgcgctttaccgcgcgcttccgtcagcattatggtttactgccgaagcatgtacgctgagcgaatttgctatcctcagcgtatagcgtgagcgaaaaggagatgattatggccagtatctgcacaatggcatgggtttacggttcggttcagggcgtgggatttcgctattccacgcagcgggaagcgctgcagctgggggtgaccggttatgcccgtaatctggatgacggcggggtggaagtgcttgcctgcggcgaggcggagcaggtggaaaaactcatcgcctggctgaaagccggggggccgcgcagcgcgcgggttgaccgagtgttaaccgagccccatcaacccacccgcagctgggacaaattcgcgatcctctattagatgcacttcaccggcttcggcaagccggcgattttagtcgcctgtttggcgggtcctttcgggaacaggcgatagagatagcggctgttgcctttctcttcgccaaacttgttggccatcgccttgaccagcatacggatcgccggagaggtgttaaattcaaggtaaaactcgcgcacaaagcgcactacttcccagtgttcaacggcgagcgttatcccttcctgcgcggcaatgacttccgccatcgcctcgctccactgggtggtatctttcagatagccttcgctatccgtttcaatttcgttgccttcaaaaataaacatgatttttcacataccgcctgaaactggccgcagtgtagcaaaaaaaaaggccccgcataagcgaggcctctgttaagcaggggagcggttagtcccggctggcgaagcccaggatgctcagcaggctgacaaaaatgttgtacagcgagacatacagactgaccgtcgcgcggatatagttggtttcaccgccgcggataatgttgctggtctcgaacaggatggcgcccgaagagatcaggatgaacaccgcgctaatcgccaggtgcagcgccggcagctgcaggaacaggttagcgaccataccaatcaggacgaccaccacgccggccatcagcatcccgccaaggaatgacatgtctttacgcgtcgtcagcacataggccgagcagcagaagaagaccagcgccgtgccgcccagcgccaggccgattaaatcgcccatgccggcagaaagatacgcgttcagcatcggcccaaggatatagccgaggaacccggtgaaggcgaaggcggaaataatcccggtgggtttattcgccgttttgtaggtcaggaacatcagaccgtacatccccacgagggtcaaaatgagacccggcgaagggagcatcagcactgtgctggcggtggcggtgatagcggaaaacgccagcgtcaggctgagcaggaagtaggtgttacgcagaaccttgtgcgtgctgagcagcgaggaacggtcacgcgatgatgtaattatgcgatccatgagtcactctcttatgacagatgtaattagggataaagaataagaaaaacaagcgtgaagccctaatgcttttacccatctttacttagtttttaccgcttttgcctggcataaaattctatatagatagggaaaagcgatatattttcgcttttcgcgtcgctgagccgatcgaaatcttataggtcactgaaaaatattgccttatggcagttctgcgactaagtgtggaagagggggattaccccgtacgtcaaaggcaaagggaaatgacattacacaaaaaaaatcacatcacccgaacactcctggctgtcagtatgctggctatgagcggcggggcgctggcggcgcaggtgccgccgggcacccagctggcggaaaagcaggagctggtcagaaataacggcagtgaaccggcgtcactcgatccgcataaagtcgagagcgatgttgaattcaatatcattagcgatctctttgaagggctggttaacgtgtcgccagcgggggcgatccagccgcgactggcggaacgctgggaaaacaaagacaacctgttatggacctttcatttacgccccggtctgacctggtccgacggcactgccattacagcgcaggatatcgtctggagctggcaacggctggtctcgccggcaacagcctccccctacgcgagctaccctggcaatatgcatatcgccaacgcccgcgagattgccctcgggcaaaagggacccgagacgttgggggtgaaagcgctgaacgacaccacgctgcaggtcactctgacccagccgaatgccgccttcctggcgatgctggcgcacccttcgctggtaccgatcgacaaagtgctggtggagcggtatgccgataaatggacccgaccagagcatatcgtcaccagcggcccgtataagctgtcccaatgggtggtgaatgagcggctggtggctgaacgtaatgcaaagtactgggataatgcgcataccgttattaataaagtgacttacctgccaatctcttcggaggccgccgatgtcaaccgctacaaagcaggggagattgatattgtctatacggtgccgatcaatcagtttgcgcagttgcagaaaaccatgggcgaccagctggacgtttcgccgcagctggcgacctattactacgaattcaatactacccggccgccgtttaacgaagcccgtgtgcgtcgcgcgctgaatatggcgcttgataaagatatcattgccgaaaaagtgcttggccagggccagcgcccggcctggctgatcggtcagccggatatcggcggcgtgacgctgcataacccggactacgccagctggccgcgtgagaaacggattgccgaggcgaaaaaactgctggcgcaggcggggtatgatgaaagccatccgctggtctttaccctgctctataacacctctgagtcgcaccagcgtatcgccattgccgccagctctatgtggaagaaaaacctcggcgtcgaggcgaagctacagaaccaggagtggaagacgatgctggataccatgcatacgcataacttcgacgccgtccgctacgcgtggattgccgactacgacgatgccgccaccttcctcaatactttccgtaccggggatagcgagaacaccagtcagtacagcaaccctgcttacgatgaggccctgcgcaatgcggcgaaagcctccgacgtggcgacccggggcaaatactatcagcaggcggaagatctgctggcgcaggatgttcccgccattccggtctatcactatgtacgtacccatctggtgaaaccttgggtagggggcttcacgccggataagctggggtattactacaccaaagacatgtacattaaaaaacacccatccgccagcggcgatgggcgttgattttctgtgcaaactgcctgaaattcagacgaataacacaaaattgtttgtttttaaggcagttgatcaaaatgatgctttacagcatccgccgaggtgtttatagtgcgcctcacaccggaagtgtggccgagcggttgaaggcaccggtcttgaaaaccggcgacccgaaagggttccagagttcgaatctctgcgcttccgccatataaaagaaggggttaccgaaaggtaaccccttcttgctttgtccggtcggtcgtgcatgacccggacagcgaccgacgacgttttcattcccacagcgctgacggatacatagcccgtcgcatggcaggacttttcacaacgcccgcttattcttcgacaatccgcgccttcggtttgctcagcaggagcatgaccagcgcgacgtagggcatcggcttccagaaatagtagccctgcagcagatgaatattctggcgattaagataatcccgttgggcctcggtttcgacgccctcggcaatgatgcgcagtgacagcgtccgcgccatctctatcacgcagtccagcagcttgcttgtcggcgcctccccggttacccggccgacaaaactctgatcgattttgatatagtcgaaaaccagctcgtggagacaggaaagcccggaatagccggtgccaaagttgtccagcgcgatggaaaacccgcgggagtgtaacgtattgagcttgtccacaaccgccccgttgagcaacagcggctcctgctccgtgatctccagcatcagcttcaccgctttaccctcaaagccgcgctgatagtgcaggcagtcatcgataaacgtcggcgcgttaatatatgacacgctgatattcaggccaatatgaaacccatccggtagtttactaaagtgtggtctcatctgcgcgttgacctgcgccatcaggctgcgggttaggggaataattaagccggtacgttcggccagcggaataaattccgcgggcgagcgcgctggcgtcgtgctgttttgccagcgggcgaggtaaatacctcctggtgtgggtccgcagccagcggcttaacatcgccatatctggcaatcatttggttctgcacccagagtgccagcccgttgtcatcggtatcgctatatagcgcatcgcgcagatggatgtcgctgatcgtgacaatcaccctgatcggcgctaagcgcgtctgatagatcagcaccggccgcttattgaccatcattctggccgggagcagtaacagagggtcatcaggcaaagactcagggctaagtgtcaggacccggttgccagttaatgacgaacacgccagcaagaaataccatcagcgccagggaaaaggcaatcactcgcagccggtggatgaagagacggcgttgtttcttggcgatcgcaccgtcagccagccggcgtggcagcccggcgcgatggtgcgactgacggtcagcggcaaggcgcgggtatttagcggctaatccctgagcaggcggcgccggctatcgccggtgccgcacagaaagctaatcaggcggaggatgaagccgatagtatccgcgccactgacctcgtcgccatggagtggtagtacgttggaacaattccgcggggtcagtccatctcaccgccgttttgccggtgtgcgctttacaaatccagcactaaccggccgcctttggcgcgcgagcagcagatcagcatactctgctggctggctttctcttcctcgctgtaatactgatcgcggtggtcggcttccccctccagaatcatcgtttcgcaggtgccgcacaccccttctcggcacaggcattcgaccttcgccgctttgttattctcgatcacctgcaaaatggtcatatcctgcggcacggtaaattcgcgtccggaacgcgccagcaccagggtaaatgcctctccgcttttatcctcaaggataaactgctcaaagtgcagctggctggcgggcacctgatggcgttcggcggcggctttcaccgcctcgttaagcgccgctgggccgcaggtatacacgtgggttcctggctcgaggtcggcgaacaggcgcggtaggtcgagacggctgccgagcgctgatacatgaacattgacccgatcgcgccatggcgcagcgctgagcgcatcgacgaaagcattactgtcggcgtcgtgaaaacagtaatgcagctgccagtcggcctgccgctgttccagttccggaatatgcgataagaatggcgtaatgccgatgccgccggcgatcagcagatgttttcgcgcctgtggttcgatggcgaacagattgttgggcgtggacaccgtcagggtatcgcccgggcgcacccgctggtgcataaaacgcgagccgcctttggaaggcgactcaagacgcaccgcaatctgccagctggaggtatccagcggcgagctcatcagcgaataggcgttactgtagcgctgctcgccatcctgcatctggacgataatatggctgccgccgctgaatgccggcagcggggcgccggtcggcgacaccagcgaaaaacgcttcacaagaggggtgatctgttcaacatcgcgaacgaccgcctcaaacatttgataatcagacatcgctgaactccattaaaaaatcccggcgtggctagcgccatcgccgggagagcagatttacaacccctggcagagatacttcatctccaggtaatcttcgattccgtgttccgacccttcgcggccaagaccggactgctttaccccgccaaacggtgcgacttcgttggaaattagcccggtattgataccgaccatcccgtattccagctgctcggagacgcgccagatacgggcggcatcgttgctgtaaaaataggaggcgaggccgtagatggtgttattcgcctgtttgatgacctgctgctcatcgtcaaatttcaccaaagcggccaccgggccgaagatctcttcctgcagcagcagtgaccccggctgtacgtcgccgatcaccgtaggggtgaagaaattaccgcccagcggatgcgctttaccgccagttaacagcgtggcgccgcggctcagggcgtcgtcgagcagggactgcactttgcgcccggcgtcggcgttgatcagcgggccaatctgtacatcggactcgctgccatcgcccactttcagggcggcgacgcgggcgacgaatttatcgcagaattggtcgtagatggcgcgatgaatatagaagcggttgacgcagacgcaggtttgcccggcgttacggaacttggcgatcagcgcgccctcgaccgctttatcgatatcggcgtcgttaaagacgataaacggcgcgttaccgccgagctctaaggagagctttttgatggattccgcgcactggcgcatcagcacgcggccaacttcggtcgaaccggtaaaggagagcttacgcacccgctcatcgccggtgaacaccgcgccaatctctcgcgactggccggtaacgacgttaatgacgccctgcgggatcccggcctgattcgccagctccgccatcgccagcgcggtaaacggcgtttcgttagccggcttaatcaccatcgtacaacccgcggccagcgccgggccggccttccgggtgatcatcgccgccgggaagttccacggggtgatcgccgcgcagacgcctaccccctggcggatcaccatcaggcgtttatcggcgccggggaggggattatctcgccgttggcgcgtttcccttgttcggcaaaccactcgataaacgaggcggcataggcgatttcgccttccgcttccgccagcggcttgccctgctcggcggtcattatctgcgccagcgcggttttgttttcgaggatcaggcggtgccagtttttcaatagcgcggcgcgctgggcggcggtgaacgcgcgccagcccggcagcgcggccgcggcggcatccactgcctgttgcgcttccgcacgccccatattggggatctggccgagcgtcgcgccggtggagggattgctgacggcaagcgttgtaccgtctgcggcgtcgcgccagcttccggcaatcagcgcctgctggcgaaacagatttgagtgaaatacggacatggccaactccttcaataattacggctggaatacctgggcgaccagattgtggaaatgcgcgatcccgtgctcggagataccgctgccgctgttatccgccataatgcgcccctggccgcgatagccgcgggacttcagccccttctgcacgctttccaccaggcgtaaatcttccgggcggaacacgtcgcgataccactcaatcagcgctttctgatcgtcagtcagctcttcgttggtgaaatagatgtcgtaattctgcagagtggtctcttcatccaccgggaattcatagataacggtcatcatgcccttgatcggcgtgacgttgaacatggtgcacggccacagccagaaaccgtgaaacgcggcgtcggtaccctcttcgaatttaaacgactgctcggacggtttggcgaagccatactgcagcgtccatttgccgtgcatggtgtgccagtagcggtcaacctggacggaatccgagaagcccgggtgcgccggaccgcagtggtaacattccagatagttatcgacgatatttttccagttcgccggggtgagggtggtaaagcgcgccgccagtttcagatcatgcacgtccggacaggcttccagcactttgtcctgcagccccggtagctgcgtttccacactctccgcttccggattcatattgataaacacaaagccggcatactcttccaggcgaaccggcaccagcgttgccttttcgctatcgaaattcgccacgttttcgcagttgcgggcgtgggcgagattgccgtccagcttgaaggcccaggcgtgataggggcaggtaatcacgtttttggctttgccttcgccgctcagtagctggtggccgcggtgcgggcagacgttatagaaggcgcgcagaatgttgtcgcggccgcggacgataacgatattttcgccgatgatctcccgggtaatgtaatcgttcggccgggcgacctcgctgccgtgggcgacgcaaatccagctattggcgaagatgcgctctttctcgtgctcaaacgcctggctgtcggtataaaaacgggccggaatggtccaggcatcctgcggattagcgcaaaagttaatcggcagggtgaagtcagggctcaaattgctcatgtagggtctccttgtgattattgtcagtaagaggttttacagcgactggccgtcgcctttgagtaccgcgccaaccggcagcgtctcggctttaataatgggctcgggggtatgggtttctatctgatggaccggaacgtgggcgtagtcctgttttaaccagcgcacgaagccgccggttttaatcagtaaaatggccaggaacggtagggcggtcagcaccacggtggttttcatggtctcaagcgaagcgccggtaaacagaatcgacagcgggatgagggtgatcaccacgcaccagaacaggcgcatgccgcgatccggatcctcgccttcgcgcaggttgcgggtactggtcgccgccatggtgtaggccaccgcatccatgtgcgaggcgaggaatacaatcatcacgaacagataggcggcgaggaacagcttacctgccggcagcgacatcaggacctgctggacggcggtttcgccgccgagagtctgcatcacctgtggtacgttaatcacgccgttaacgaactggtgcatggcgtagctttccatcaccccgaagaaaaaccagcagccggcggtgctaccgaggagcagtccccagatcacctctttgattttgcgcccgcgggagacgcgggtgacgaacatcgccacgcctggggtgtaggagatccaccacagccagtagaagacggtccagttgcgggtaaaggcgccgtcgccgagcgggtcggtaaacaggctcatctgcaggaagttttgggtcgtcaggccgacggcgttaatgacgttattggtgatgaattcggtcggaccaaccagtaataccaccaacggcagcagaaacgccccccagccgaccattttgctcaggcgctgcaggccgttgttgatgccaatccacgaactcatgcagaaaataccgccggagagcaggatcacaaatgcctgcacggtgaagttatccggcagtcctgtcagcgctgacaggccgcgggtgaaggtggcggcggtgactaccagcgaaatggttaacgcgccgacggtagcgatcaggaacatcagatcgaccagacggccccagaaaccttgcggattaacgccggtgatcgccgaaacgatcccggagaggctgaggcctttatttttccgcacgtggaagtgataggccatgatcagcgaggcgagggtataggttgcccaggcgcttacgccccagtggaagaaagagtaagggatgctgtattccagcgctttcggcgattgcggggcaatgttaaggcccggggtctggtagtaataagcccattcggcaacgccccagtacagcgtggaggagccgagaccggcgcagataaacataaacagccatgagagggtactgtattcgactttaccttcgccgagacggatattgccgtatttgctggtggccagatacaacaccagtcccagcgccagcagcaccagtacctgtaccgtggaacccagcaggcgggtcacgccgttaaaaatcgaatcagccgcctgcgcggtttgctgggggaagagacttaatgtagcggcgatgaaaacaatggccgccaggctgatggcaatcagcggcacatcttttttctttacgttgctcaacatgagtgatctcctgggcatgattgcccgtcggtggctttagcctgtcgttgttatcacgctgtagggtcagggttcgcagcaagatgctattaacaattggattatttcttcgttacatgaattaaacaattggccgtttcgtgaagcaataaaacacgaaacggaaataataaaaggtgaattggcgcaggttctgtcctttcaggaattaataaggttcaccgctgtgatgcggttcacttgtcaatcgtggggtattctgcatagcgaaaagagaggggagttggcggaccaggcgcgcgggttttcccgggtagcggctgcgccttacccgggctacttgctgtgccgttttttgccgggtagcggctgcgccttacccgggctactcactacattatcgtgccattgtagccccggtaagcgcagcgccaccggggagcggcggggtaattacgccaaaatggccttgcagatagcctcgctaacctgctgcgttgaggcactgcctttcatgtccggagttttcggtccacaggcgatcgtctgctcaatcgcagccagaatgccatcgtgagcggcgtggtagcgctcatcgccgttgccgaggaaatcgagcatcatcgccccggcccaaacggtggcgatcgggttggcgatatttttaccgtaaatatccggcgccgacccgtgaaccggttcgaacagcgacgggaaattgcgctccggattgagattggccgatggcgcaataccgatagtgccggtacaggccgggccgagatcggagagaatatcgccgaacaggttagaacccactaccacgtcgaaacgctccggctgcagcacgaaacgggcgcacaggatatcgatatgctgcttgtcccagcgaatttcgggatagtttttggccatctcttccacccgctcatcccagtagggcatgctgatcgccaggccattggatttggttgcggaggtcagcgttttgcgtgggcggctttgcgccagttcgaaggcgtagcgcaggatccggtccacgccgcggcgggtaaagaccgactcctgaatcaccacttcatgctcggtgccttcattggcgcggccgcccagggcggaatattcgccttcggtattttcgcgcaccacgtaaaaatcaatatcgccggcctttttacccgccagcgggcaggggacgccggggaacaggcgcaccgggcgcaggttgacgtattggtcaaactcgcggcggaacttcagcagcgacccccacagcgaaatgtggtcgggaacggtatccggccagccgacggcgccgaagtagatggcatcgaagccctgcagctgctcgcgccagtcgtccggcatcatcttgccataatgggcgtaatattcgcagcttgcccactccatctgctcgaagctcagcgacagatcccaacgctgtgcggcggcttgcagcacgcgaatcccttcaggcagaacttctttgccaattccgtcacccgggatggcggcaatacgacaggtttttttcattccggttctcactttttaacgatgatgtttgaccacctgcctatcctataattgactggttcataattaatcacgctaactggtgaaacataaaacacagatcatgaataatctgccgctgctaaatgatttacgcgtctttatgctggtcgctcgccgggccgggttcgccgccgccgccgaggagcttggcgtatcgccggcgttcgtcagcaagcgggtttcgctgctggagcaaaccctgaatgtgatgttgctgcaccggaccacccgtcgggtcaccattaccgaagagggggagcggatctatgaatgggcgcagcgcattttgcaggatgtcgatgagatgatggatgagctttccgacgtgcgccaggtgccgcagggaacgctgcgtattatcagtagcttcggctttggccgtcgggttgtcgccccggcgctgtcggcgctggctctccagtacccgcagctggagctgcgtttcgatgtccaggaccggctggtggatttagtcaatgaaggggtggatctcgatattcgcgtcggcgacgatatcgcaccgaatctgattgcccgccagctggcggccaatcaccgcgtactctgcgcctcgccgcagttccttgcccgccatgcgccgccgaaacagctgagcgatctggccgcgttaccctgcctggtgattaaagagcgcgatcatccgttcggcgtctggcaattgcatagcaaagagggccagcacgccatcaaggtaaccgggccgctctcctccaaccatggtgaaattgtgcatcagtggtgtctggacgggcaggggattgcgctccgttcgtggtgggacgtccgggagaatatcgccagcggacatctggtgcaggtgctgccggactactggcagccggccaacgtctgggcggtttacgtctcccggctggcgacgtcggccaaaatccgcaccaccgtggagtttctgcgccactactttcagctgcactatccgcagcatgagccgacggccagcgccgtcggcagaggcgattaaaccccaaggcggtcgcgcaggctgtagtaggcggcgcccatggcggtaaaaggaatgcgcaggctgcggccgcccgggaacgggtagtgcggcagtttggcgaaggcgtcgaaacgctcggcgtcgccgcgcagcagctctgaaatcaagcgtccggcaaggtgggtacaggtcacgccgtggccgctgtagccctgcatgtagtaaatattgttatcgagacgcccgaactgcggcatccgcgacagggttagcaggaagttgcccgtccagcggtagtcaatcttcaccccctgcagctgcgggaaggttttcagcagtttcggcataatcagccgctccacgtcgtccggatcgcgcgcgccgtagaccacgccgccgccgtacagcagacggttgtcgccggtcagacggtagtagtccagcaggtagttacagtcttccacacagtagtttttcgggatcagcgagcgggcgacctcttccgacagcggagcggtagtgaccacctgggtgccgcacggcatgctgcgtttcgccagctccggctccagtttatcgccgagataggcgttgccggcgacgatcacgtagcgcgcggtgacctggccgcgcgcggtgctgaccaccgccgggctggtgtgctggatgcgggtgaccggcgactgctcatacacccggccgccgttcaggcgaatggcatccgcttcgccgatggcgaggttcagcgggtgaatatggccgccgctgtggtcgagcagggcgccgacgtagcggtcgctgtccacttcgcgacgaatggcttctctgtccagcagctccagctgggtgttgccgtagcgctcccagttggctttctgctcttccagggtttccagctgtttatggttcatcgccacgaacaggccgcccgggcggtaatcgcactggatctgataccgctggatgcgttcgcggatgatatcgccaccttcgaacatcatactgccgagcatttttgccgcatccgggccgtagttcttttcaatgacgtcgatatcgcggctataggagttgaccagctgcccgccgttgcggccgctggcgccgaagccgatgcgcgccccttccagcaccaccacgtcgtagcccatttcggccagatgcagggcagacgagaggccggtgtagccgccgccgacgacgcagacgtcacagttgatggatccctccagcgtcgggaacggttcatacttgttggcgctggcggcatagtagctagtggtatgttcagtcatgatcaagactccagggcaatccagatggttttcagttcggtgaatttttccagcgcgtgcagcgatttatcgcgcccgttgccgctctgcttgtagccgccgaacggaacggtcatatcaccatcgttatagttgttgacgaagaccgagccggccttcaggcggcggctcatgcggtgggcgcgggagagatcgcgggtccacaccgcggcgcccaagccgtagtcgctgtcattggcgagctttagcgcctcttcttcgcttttgaagcgggtcaccaccagcaccgggccgaagatctcttcccggctgagggttgatgccgggtcgacgtcaacgaaaatggtcgggccaacggcggcaggccacgggtttttccgtccgtcgaggaacagggtgctttggctttcgccgccgcgaataaagctatgcacgttgtcggcatgggtattgtcaatcagcatgcccatggtggtgtccggatcgagcgggttgcccggctgccagtgttgtgcctcatctttcagccgcgccaggaattcgtcagcgatgctctcctcgagcagcagacgggtcccggcgatgcacacctgtccctggttgtagaagatgccgccggcggtggcgcgaaccgcttgttgcagatccgggcaatcggcgaagacaatgttggcgctcttgccgcccgcttccagccacacgcgcttcatattgctgtcgccggcgtctttcagcagctgcttgccggtgcgggtggagccggtgaaggtgatgacttcaacatcaggatgcagggccagcgcctgcccggcctcgtggccaaagccgctgaccacgttcaacacgccgtccggcaggccggcctctttcgccagcccggccagacgcagggcggtaagcggcgatttttccgagggtttgaggattacgctattgcccgccgccagcgccgggccgagtttccagcaggccagcagcagcgggaagttccacggcaccaccgcggcgatcacgccaattggttcgcgaacgatcatcgccagctcgttgctgccggtgggggccacttcgccatagactttatccagcgcttcggcataccagcgaatggcgcgggcggcgccgggaatatcgtcgcgcaggctgtggcgaatcggtttgccggtatccagcgtttccagcagcgccagctcttcacgatgggcctccatcagatcagcaaagcgagtgaggatcgctttacgctgtgcgggggaggcctgcgaccagtcgccgttatcaaaagcctggcgcgcggctttcaccgcccgttcgacgtcggcttttttaccgcgggcgacctgggctaatgtctgctgcgcggcagggtcgatagtctcaaaggtggtattatcggccgcggcgcaatattcgccgttaataaataagcgtgtttcaatggccaggtttttcgctttttcctgccagtaagccaggtgctgaaaattcatcatgactccttaaaaacattatcggcaaaataatcagtgcggcgttttcaggctgcacggggcactgcgccgggcgcagggcatagcgtatccccggagttgaataccgttttattctcctgagttttgacaggttgtttgcaacccgaattattcaggagcgagtcgccattcactggcgttaattatttcagggccaacaggaaataatattccgtacggcgcagacgttattactacgagttcttcgccgcgacgaaaatagattttccgtcgcgacaggcctgaagtaagcctgaacctcgttcaggcgaaataatcagaatgtggtgggggtgtgggcactgatgatgcggcagatgcctgccgaggtgttgctgaagctgtgcggaatgccggtattaatggcatagctttgtccagccaccaggtggtacgactgaccgttaatggtcagcacgatctcaccttccagtatggtgcctatctcctcaccctgatgcttaatcctctccccggtcgtggttccaggctggtaagtttcaaaaatcatcgccagcgtacggttcggatttccgttatgaaccagcttcatggaaacgccctgacttcccatctcaatcaggtcatcctgattaatgaccacctggggttcgtccggcttttcgggttcagaaaagaattccgagagcgacagcccatagactttcagcagcttttgcagcgtactgatggcaggactgactttatcctgctctatggtgctgatggcactatgtgttaacccagacagttcggcggcacgacgctgtgagagacccagctgctggcggatctctgacagacgtttccctggcgccagtccgtcatcgctcatatttgcatttccttaacggtagtggtcagcgccgccgcttttcagcatgatggccctgacaggcggtgataaaaccatcaaacaacatacgcgacagggcgtattcgctactgttccattctggatgccactgtacgcccagcgcgaaaggatgatcgttcacgctgaccgcttccaccagtccatccggcgctcgcgcctccacgcgcagctgcggactgagggtttttgccccttgcccatgtagcgagtttacccaaaacgtgttgcagcccggtatcaattgcgacagcaatcctccttcctgaacctcaacctgatgggacggcgcatactgctgctcgacgggcagttcaggatcttcgcgatgttcaaggagctcaggctgctcgaacagacgacgatacagagtcccgccggtggcgacaaccagttcctgcagtccacgacagatggcgaaaatggggatgcgcctttcgagcgcggcgttaatcagcgccatgctcagaagatcacgcccggggtcggcgtcaggctcatcgccgttttcaccataaaggtgcggctgcacattgctggggctgcctggcaggtagatcccgtccagtttatcaacgaccgcgttcagtagctccggctccgccagcgcatgcggcagggcaatcggcagtccgccggcgttaacaattgcattcaggtacttttcttgcaaggtctgggtctggtgacccttaagcctgtttctacacatcacgacgccaataactggcttgtacattatattttccatgatcgccctcacaaagtggactaaattatgaccgctatagcgggtttaacggccatatcgttcaatattttctcaatctagcagtggaaatagccctttgcaaacttaatttaacatttgacaaacaatttatttgcatacacagtcgatggggtggacattatatttaacggtctgagtgcaggaccgaaacccaaccaacggcggtgaatcatggaaaccaatatcgtagaagttgagaattttgttcagcaaacggaagagagacgggttagcgcgttcgcgaaagaagtgaagcgctacctcgaaacctaccctgatacccagtatgtcgatgtcctcctcactgacctgaacggctgcttccgcggcaagcgcatcccggttgccggcctgagcaaactggagaaaggctgttatttcccggcctcggtgtttgcgatggatattctcggcaatgtggtggaagaggccggtctgggccaggagatgggcgagccggatcgcagctgcatcccggtacccggcaccttaaccccttcggcggctgacccacaatcgatagcccaggtacagctaaccatggttgatgaagatggcgctccctttgacgttgagccgcggaacgtactcaaccgcctctggcagcagttgcgccagcgcgggctgttccccgtggtagcggtagagctggagttctatttactggaccgcaaacgcgatgccgaaggctacctgcagccgccgtgtgcgccgggcactgacgatcgcaacacccaaagccaggtctactcggtcgataaccttaaccacttcgccgacgtgctcaacgacatcgacgagctggccaaactgcagctgatccccgccgatggcgcggtggcggaagcctcgccgggccagtttgaaatcaaccttcaccataccgataacgtgctggacgcctgcgatgatgcgctggcgttaaaacgtctcgtgcgtttgatggcggagaagcataagatgcacgccacttttatggcgaagccttatgaagagcatgccggcagtgggatgcatatccacatcagcatgctgaacaataaaggggaaaacgtgctggtggacggcgatggggaagactctgcgctgctcaaacgcgcgctggccgggatgatcgatctgatgccggcctcgatggcgctgctggcgccgaacgtgaactcgtatcgccgcttccagccggggatgtacgtcccgacgcaggcttcgtgggggcataacaaccgcaccgtcgcgctgcgtattccgtgcggcgagcggcagaaccaccgcgtggagtatcgcgtcgcgggggcggacgccaacccgtatctggtgatggcggcgatttttgccggcattctgcacgggctggataacccccagctgcctttacaggaagaggtggaaggtaacggtctggaacaagagggcctgccattcccgatccgccagagcgatgcgctgtgggagtttatgcagaacgatcacttgcgtgagcgcctcggcgagcgtttctgccatgttttccatgcctgtaagcatgatgaattactgcagtttgagcgtcttatcacagaaaccgaaattgagtggatgttgaaaaacgcctgatggtcgccccgcgaggggcccataagtttggtaatcagtagcatcatacggcctgagcggagcctggccgacgtttttgctgggagcccagccatttcccggatgtcgcgttaaggagcgcaggcggcaacggggcttcagttaacgacacagtgtgtgacgaggaaatgagatgatgcagatgttcaaatatccgcagggagagggaggccgctcaggccgcattggatgccagccagctaccgcttaccggtccgtcttacccttttatctatgccttacccctttgctaagcaggtttgtcacgcggacgttgggcccgcaaactgttaacagcaaggggggatgggcgatggctattaatcctccggcgcataacgccgctcaggcgggcagaccgcgtctgcgtaaatccctcaaactctggcaagtggtgatgatggggctggcctatctgacgccaatgacggtgtttgataccttcggcatcgtctccggcatcagcaatggccacgttccggcgtcttatctgctggcgctggctggcgtgctgttcaccgccatcagctacggcaaactggtgcgtcagtttccggaagccggttccgcctatacctacgcgcaaaaatccatcagtccgcacgtcggctttatggttggctggtcgtcgctgctggattatctgtttctgccgatgatcaacgtcctgctggcgaagatctatctctcggccttgttccccgaagtgccgccgtgggtgtgggtagtgacctttgtcgctattctgaccgccgcgaacctgaaaagcgttaacctggtggccaacttcaataccctgttcgtgctggtgcagatttcgatcatggtggtgtttgtcattctggtggtgcaggggctgcataaaggcgagggggtgggtaccgtctggtcgctgcagccgtttatcagccagaatgcgcatctgatcccgattattaccggcgcgaccattgtctgcttctcgtttctcggcttcgacgcggtgaccaccctgtcggaagagacccctgacgccgcgcgggtgatcccgaaggcaatttttctcaccgcgatgtacggcggcattatctttatcgtcgcgtcgttctttatgcagctgttcttcccggatattcatcgctttaaagaccccgatgccgcgctgccggagattgcgctgtacgtgggcggcaagctgttccagtcgattttcctgtgcaccacctttgttaacaccctggcgtccggcctggcctcccatgccagcgtctcccgtctgctgtacgtgatgggccgcgacaacgtcttcccggagcgcatttttggctatgtgcatccgaaatggcgtaccccagcgctgaacgtgattatggtgggcatcgttgcgctgtcggcgctgttcttcgacctggtgaccgccaccgcgttgattaatttcggcgcgctggtggccttcaccttcgttaacctgtcggtgttcaaccacttctggcggcgcaaggggtacaacaaaacctggaaggatcgactgcattatctgctgctgccgatggtcggggcgttgacggtcggggtattgtggatcaatctcgaggccacctccctgacgctcggcctggtgtgggcggcgcttggtctgctgtacctgacttatctgacccgacgcttccgcaaaccgccgccgcagtttgatgccgctaaagcggagcaggcctgggagtcataggttctgaggcataaactgaacgaaggcaggcccgcaggcctgctttcgttttggcttcggtaagggacagtacaggacggtaaagaaatcagcagaaaacggtggggaacggaaggtattatttcttctttttatggacaggtaactgactggcgcgccgctctttgaggtacgacaccaggctgtagatggcgacgcccagcagcgccaccgcgacgataaagagaataagacccgacatagaccaacctaatattctgtttggaaagggaaaaagatacagggctctgtgtgaagataacatcgggatatgtctgaaagatgacgcctcatcgcgagaatatccggcggcggggttgtgataaaatgtttcccgcagggatgtgaccgcctgggtttcagctgaaatggcgtaacactccgttaagtgattttacagaagtgcggcctacagcgagttacgctgaccgcgaataagaacgatctgagagtcagtcatgtataagaaaaccctcagcctgctgggcgtagcgttggcgctgtctgccttcgccagtcaggctgaaagtgaacgtcaggcgagccgcgagcggatcgtggagcaggtcctcaagccgtgtgaaggcaaaaaggcgggcgataaggtggtgattaccgatcgccgcggcggcgagcacgaggcgatctgtaccctgacggcggttccgctaccggagtagcgcccgccgcacggtgccgcttatcgataccgcggcgcaggctgtccggttcgcgcgctggtaaacagcgccactctggactgctcaaaagtctcccacagtcccaggtcatgaaccggtggtaaggtgacctgttcccccatctccagccccctgagagcggcgtcaaccagatcctcggtggtcattaccgtgccgctgggcagagcgtccagcgccacgccggaggtcggccacagatcggtagcggtcgccgccggcaataccgcctgaatacgcacgccgctgtcggcaaactcctcctgcaggccgcgggtgaagctcaacacccaggctttgctggcgctgtagactgcgctgcccggcagcgtatgcagcgcgaggatagaggcaatattgatcagcgtcccccggtgtcgtggggtgaaagcggccagcgcggcatagctcagacgcagcagcgcggtggtgttgagcgtatgaatcgcctggtgctcgcgtggcgtactggcgagaaaacccgccaatttcgcggtgccggcgttgttaatgaacaggtcgatggcgggatcctgctgcagacgctgctctacggcggcaatcccgtgctcttcgctaagatcggctttgaggatgcttgcctggatggcgtagcgcgcctgcagctggtcggcgagcgcctgcagacggtcttcacgacgggcggcgaggatcaggttgtagccgcgggcggcgagtcgttcggcatagatcgcgccgatacctgaggacgcgccggtgataaaagctgtgtgcgatggttgggtcatgagaaatgcctcgtaaaaggttgcattattaaaccaaattcagcatgagatattaggtttaataatgcaaccattttgccaggactttttcatttttgcctgtcgagggcagcgtttagtcgttcagcgggatagcgatggtgatgtccgccggggccagctcacggccatccgccgcctgcaggaccagcttacgcaggggctggcgctgctggcggtcaatgagccgggtcgccggttcgtcaggatcgaacagatagtcgtctgcccactgggagagggcgaccagcaccgtttgcagggcacggcccttatcggtcaggacatactcctgccaggcgctgccgtcggaggccggctgcaggcgcaggatgccttcatccaccagcattttcagccgcccggcgagcatgtttttggcgataccgaggtttttctggaattcgctaaaacggcgcaccccgcgcagagcatcgcggacgatcagcagcgaccaccagtcaccgataacgtcgagggagcgggcgatagggcaacagctgttttccagacgggtacgtttcacgaaagcctccaggttaattgtttcattataaaactctttgccctgcaggggaaattttcggctacggtctaagtttgcgagcgattaccaggaaaaatgtcataaatccggcacaattaacgcgatgataataaatgactaaggatgaagggatgaaaaaacgtctacttgccgccgccgttgccggcgcggtgatgttatccgctggcgctcaggcgcaggacacggccgccccggaggggtatcagctgcagcaggtgctgatcatgagtcgtcacaacttgcgtgcgccgttggccaataacggcagcgtgctggagcagtccaccgccaaggcctggccgcagtgggatgtgccgggcggccagctgaccaccaaaggcggtgtgctggaggtgtatatgggccactatatgcgcgaatggctggcgcagcagaagctggtgaccagcggcgagtgcccgccggaaaacgcggtttatgcctacgctaacagcctgcagcgcaccgtcgccaccgcgcagttctttatcaccggcgcgttcccgggctgcggcatcccggtgcatcaccagccgcagatgggcaccatggacccgaccttcaacccggttattaccgacgactccccggcgtttcgcgagaaagcgctgcaggcgatggaaaaagagcgccagggaatgcagttgaccgagagctacaagctgctggagacgatgatcgattaccgcaactcgccctcctgcaaagagaagaaggtctgttccctgagcgagggtaaagatacctttagcgccggttatcagcaggagccgggagtgtccggaccgttgaaggtgggcaactcgctggtagacgccttcaccctgcaatattatgaaggcttcccgaaagatcaggtggcgtggggggagatcgccagcgataagcagtggcaagtgctgtcgaagctgaaaaatggctatcaggatagtctgtttacctcggtggcggtggcgcaaaacgtcgccaaaccgctggttaaatatatcgataacgcgctggtgggcgagggagccagcaaggcgaaagtcacgctgctggtgggacacgactcgaatatcgcttcgctgctcaccgccctggattttaagccctatcaactgcccggccagtatgagcgcactcctatcggcggcaaactgctgtttcagcgctggcatgacagcgccggtaatcgcgatctgatgaagattgagtatgtctatcaaagtaccgagcaactgcgtaacgccgacgcgttaaccctgcaggccccgccgcagcggatcactctggcgcttaacggctgtccggttgatgaccagggattctgcccgctggagacctttaaaaaggtgatcaacgaggcggcgaaataacgaaaaaaacccggagcactccgggtttttttagcaggttagggtgagcccaggtggggataaacctcctagacgtttttacgctcaatcgtctgttcgccccagaacaggctgtctttatcggttttggcaaaggccagcgccagcacttcgtcgctgccttcctcccagatttgctccgccagtttctcatcgtagtgggcgacttcgaaaatcgcctcggcaatttccggtgaggtgttacgtaaacttgcccattcgccgacgcgatgtgcttttgcttcttgagttggcatagtgctcctcctgcagaagattagccgtgcagtttaacggccagtttggcgacatgttcaccctgatagcgggcgatggctaactcttcctcgctcggctgccgcgagccgtcgccgccggcgatggtggttgcgccataaggggtaccgccgcgtacctgggagatatcgaatagctcctgggcgccatagccgatcgggacgatgatcatgccgtggtgggccagcgtcgtccaggtcgaggtaatggtttgttcctggccgccgccggtaccggttgagctaaatacgctggcgattttgccatacagagcgccggacgcccacagaccgccggtttgatcgaggaaagtacgcatctgaccggacatgttgccgaagcgcgtcggggtaccaaagatgatggcgtcatactctgccagctcctgcggcgtggcgacgggcgcgttttgcgttttcccgcctgctttggcgaatgcttcagcctgcatggtttccggcacgcgcttcacaaccacctcaacgccgtccacccggttcgccccatcggcgacggcgtgagccatggtttcaatgtgtccatacatggaataataaagcaccagaattttagccatttccatcactcctcggttgcattataagccagcaaaatagctggtacctttaaagataaagcctccgccggagagtgcaaatccaacgggcatttgtttgatttataacaaaatgacaaagcgttatttacttttccttgcaccgcgcggcctgaaaggaagtgaaggaggaagcgttgcgcctgctattttggccgctgcggcgaggatgtagcatcaggatacatttttgctgactattttttcttcgccagcagagtcggttaggagctgttcgcggcgcgaggaagcttttttcgcccggctttgtttctggatattacattcgccgccgtcagccgcagtcattcactaaccttatagatacgcggcaggacagcggcgtcgccgctcccgcgtaatgcactatgatgtctaacctaatggaggtcagtaatggcaaaccatcgtggcggttccggcaactttgccgaagaccgtgaaagagcatcagaagcaggacgtaaaggtggccagcatagcggggggaattttaaaaatgaccctcagcgcgcctcagaggctggcaaaaaagggggtaaaaacagtcatggtagtcgtgaaagttaacgcgcgactcgcactgttctctttgatgcggtgttaatctccccgacccaaccgcatcgccctcgccgccggcatctgccggcggtttttttatctgtcggtggttgcgctcccgccgggcggattgcacactggtcgcccgttaatcgtcatggctgtcttatgtcttcgttaaaattctccgttagccgccaggaagcgctccttatcatgatcaccatgttctggggagggacgttccttgccgtacagtacgcggtgagcctcagcgggccgctgttttttgtcggtttgcgttttgcgactgccgcgctgtcggtgggcctgctttcgctgcgcactctgcgcggtctgacgtggctggaggtgaaggccggggtagcgattggcgtggcgattgcgctggggtatggcctgcagacctggggactacagaccatctccagcagtaaatctgcctttatcaccgcgatgtatgtgccgctggtgccgctgctgcagtggctgtgcctgggacgtatgccgggggtgatgtcctgcgtggggattgtgctggcctttattggtttaattctgctggccgggccggaaaataatctgctggcgcttggcgtgggggagatgatcactctggcaagcgcggtggcgatcgcggcggagattatccttatcagcgcctgggccgggaaagtcgatgtccgccgggtgacggtggtgcagctggcgaccgcgtcgctggtggctttcgccgccatgaagccggcgggtgaatcggtgccgtcgttgacgccggccctgctcggcgtcgcgctggggctggggattttcagcgcgatcattcaggtgaccatgaactgggcgcagcgcagcgtctcgccgacgcgggccacccttatttataccggtgaaccggtatgggccggtatttttggccggctggccggtgagcgtctgccgctgctggccctgctcggctgcgttttgatcctcgcgggagtgctggtgagcgagctgaagtggaagcgcaagtcgccgccgcaggtttccacaaacgacgatgcgcagccgctcacggacctggccgatcgccgcgagccataatattttccttctgacccgacagcggcgcttatcctggctggtactcgtccggctctgattgtctccaggcccgtgcaagcgcagcgccgccgggcggtcaggttccgtgcccgtggtggtgccggatggcggcataaatgccttatccggcctacaggatcacaccacccaggcccacaccgctccctgcgccaacgccgcgctaatgtggcttacaccggcgttaccctggcctccttcgcctcgcgcgtcccgcgatgaagcagcgcgtgcagcaggatcgccccgaaggtggctgtgccaatcccgcccagcgtaaagccgcccagcgacagcgcgaaatcgccggcgcccagcaccagggtcaccgacaccatgatcaaattgctgttttgactcagatccacccggttttgcacccagatccgcgccccggcgacggcaattaagccaaataccacgatcgaggcgccgccgatcaccggcccgggaatggtgtggattaatgcgccgaacttcggcgagaaacccaacagcatggcaatcagcgccgcggcgacaaacaccagcgttgagtagaccttggtcaccgccatgacgccgatgttctccgcataggtggtgaccccgctgccgcccaccgaaccggagagcatggtcgccagcccgtcgccgacgaaggcgcgccccatgtacgggtccatattgcgcccggtcatcccggcgacggccttcaggtgcccgaggttctcggccaccaggatcaccgcgaccggcgcaatcaacatcatcgcctggccgttaaaggatgggggggtaaagtgcggcagcccgaaccacgccgcctgggcgaggggggagaagtccagcggtttgccaaggcccaggccgttagccagcagggcgtacagcgcgcaggcgacaatcaggccgaccaggatcagcagtcgctgcagcatcccgcgggtaaataccgccactatgccgatgcagagcacagttaacaccgccatccagctgtcgaaggcgctggcggagacgctgcgcacggcaatcggcgccaggttcaggccgatagccatcaccaccgcgccggtcaccaccggcggcatcaggcgctcgatccagcgggtgccgatcttcatcaccaccagaccaatcagggtgtagaccagcccgcaggcgatgatcccgccaagggcgacgctcagatgagggttcagcccctggccgttaaagccggtaatggcgatcaccaccccgacaaaagcggcgctggagccgagatagctcggcacccgtccgccggtgacgacaaagaacagcagggtgccgacgcccgacatcagaatagacaggttcgggtcgagccccatcaacaacggcatcagcaccgtcgcgccgaacatcgcaacggcgtgctgcacgcccatcaccagcgtttgcccggccgacaagcgttcatcgggggcgacaacgccggattcggcggcgggggaggtcagcttccagcgaggaaaatcgaagagtgccatgatgatatcccgggttaaaggttaacaagcgggtcgcataagcgtgtgatagccgcggtcaaaccacatcagtccccggggctccgggtgacgggtaatggccacgacgtgacaaaacagaatgtcgtgcgtcccgacgctgacgcgctggtcgatgcggcagtcaaagctgaccagagccgcctccagccgcggacagccggtggcgccggtctgccagtcggcggcggcaaaacgctcgtccattgccgttttaccgccaaacagcgtcgacagggcctcctgtccggccgccagggtattgacgcacagcgtgtggtgttcgctgaacaccggccacaccgaagccgagcggttcaggcagaccagcagggtcggcggcgtgtcggtaacgctgcagaccgcgctggcggtgaaccccgcccggcccgccgggccatcggtggtaataatgttaaccgcggcgccgacgtgggccatggcgtcacggaaactcgctttgtccgttaactccatcgtaaactccttatgccagcaggcaggcttcatcaaaggacaggcgcggcaggcggccgtacagcttgccggggtcgccatagccgatattcaccagtagattgcttttccagccgttgtcggcaaaaaatgccgcgtcgactttttcccggtcaaaaccggacattggcccggtgtcgaggcccagcgcccggcaggcaaaaatcagatacgccgcctgcagggagctgttgcgaaacgcggtctcttccgccagctgcgggctggaggtaaaccagctgcgggcgtcaccgtggggaaacagggtcggcagccggtcgtagaaggcgctatcccacgccacgatggcggtcaccggcgcctgcatggttttctgcagattgccgctggagagcgtcgggcgaagtttctctttgccttccgcgctgcgcacgaacacgatgcgcgctggcgaacagttggcggaagtcggccccattttcatcaggtcccagacggcctgcagctgcgcatcgctcaccggcttatccagccagccgttgtgggtccgggcctgggtaaacagcgtctcgcaggccgtgtggtttatcgcgtcgttcatcgggtctccctggcgaccggcagcatagcggacagcccgtcgcgtaaaatggtattaaaggtatcggcgtcggtgacgttacaggcatggccgccccacggcatttccacgagctggctgccggggatcgccgtctgcagcacgcgggagcaggaggcggggaccagcaggtcgtcagcggcgctgataatcagcgtcgggcaggcgatggccgacgcacggcgtgaaaaatcagcctgcttcagggcctgcagccgcttcagcagattctctttgccctgaaaatggctgatggcaagcgcatcttccgcttcgaggcgcggcaggcgcgcggccatccattccgccgggtagagaaatagcggctgcgcttcgacccacgcctgcgcgccgccggcatgcagcagacgctcgcgcacctggaagcagcggcgggtatgcggcgacagcgacagccagccgttgaccagcgccagggcgctcaccgcctcggggcgatcgagcgccagctgcaggccaatcagcgcccccagggcgtggcccaccagcgcgaagcgggcgatccccgccgcccgcagagcgctgaacagctccccggccatcgtcgccaggctgtagccggcgggcagcggaccggcgttctccccggtcccgttatggtcataactcaccagctgatactgttcctccagcgccgcgcgctgcgccagccagtagccgccgcccccgcccagaccggcgctgaggaccaccaccggcgcgccgggccacggagccggagcaatattgagcctcatcatgtcggggtaccgatatgggcgacgctggcgatttccaccagcgcatcgggcttcaccagtccgcactgaatgcagaagcgcgccggtttatcgccggggaagaactcggcgtagacctcgttaatcgcggcgtaatttgtccagtcggtgataaagatgctgttgaaagtcacatccgccatactcccgcccgccgtttcgataacgctcctgatggtctccagcacgtggcgggtttgcgcctttgggtcgccgatgtgcaccacattgttttgcttatcaaacggcagggtgcccgagacgtagaccaccccgtcggcgagcgtccccggaacaaagggggcaatcggcgcggtggtgcctggcggaataatcacctgtttaggcataacgtttctccttggctaaagccagcggggcggcgggggacagcgcgtggcagaagctctcgacgtcgctgacccagccgaaaaaggtttcaatattgaacagcgccgcctgctgggcgaaggccgggccggcctgatgggtggcatcctccagcacgatgccgaagtattcgagaaagaagccatcgcgcagcgtcgattcgacgcagacgttggtggcgatcccggtgaacaccaggtggcgtatgccgcggctgcgcaaaatgctgtcgagcggggtgttaaagaagccgctgtagcgcggtttcggcaacacgatatcgccttcctgcggcgtcagctcgtccaccagctgataatcccagccgcctttcgccagcagcttgccctgcagctccggacgctgacgcatcgttttcagcgcgttggatttgtgatagttcggcgagcccgggccgccggcttcaacatactgatcatcccagccattctggaaccagataatcaacatacccgcggcgcgagcggcggcgacggcggtattaatattgtcgataaccggccgggtagcggagacgtcaaagccggcgagatccagataaccgccctggctggcgtaggcgttctgcatatcgaccacaatcagcgcgctctgctgcggcgcgaaggtcagggattccgggcgagcgggaagggtaatcatcaggccacctcacgggtaacagaagcaatgtggttccggcagcgcatcagcggctgaatgcgttcgccaaaggcgtcaatgccggcaagaaaatcatcaaaagtcagcagcacgccgtcggtgccgggcacgctcgctacttcatcaagcatacgggcgacgctggcatacgatccgaccagggtgcccatgttaatgttgaccgccgaggtggggtcggccatctggcgcacgttggtatcgctgccggagcgggtatctttctgactctgctcggtgagccacgccagcgcttcttcatcggcgcccgctttgtaatgttcccatttggcgcgcgccgcctcgtcggtttcgtcggcgatcaccatgaacagcacataggaccccacgtcgcggccggttttttccgccgcctgcatcatgcgtgcggcggtcggggcaaaggccgttggcgtgttgacccctttgccaaagcaaaagttgtagtccgcatgctgggcggagaaggccatcccggcatcgctctgcccggcgcagatcaccttcatcggctgcgacgggcgcgggctgacccggcagtcgttcatggtgaagtagtcacctttgaaatcgctgcgcccggtgccccacaggtcacggagcacctggacgtattcggtgagatagtcatagcggctggcgaaatagtcatctcccggccacatgcccatctggtcatattccggtttttgccagccggtcaccagattgacgccaaaccggccgccggagatggagtcgatagtggaggccatccgggcgacaatcgccggcggcagcgtcagggtggcggcggtggcgtagatctggatcttcgaggtcaccgcggccaggccggccatcagggtaaaggactccaggttgtgatcccagaattcagttttcccgccgaagccgcgcagtttgatcatggagagcgcgaagtcgaaatggtagtgctcggccttctgcacgatggccttattcagttcaaaggtcggcatatactgcggggcatgggtggagatcagccagccgttgttgccaatgggaacgaaaacaccaattttcatacctacctctctgcagtcatggaagatgggttgcgatggtgcggcatcctgcctctccctggaccacctcgcagaaaaggtaaagcaaaggcgatgccagttttataaatgctaatgttattaatgtgttacttttgagttgctaaaaaggacgataaaaaagtggactggatggtcaaaatcagtgcacgaaaaaacggcagtcatgcgcaatcagggtgcatggggtcgtgtcggcgcagggcttttgctatgctggtggcgtcaactgaaggagaggatgtatggcacagggcgcggtgaagaaaagcggcaaacgttcacaagcggtcagcgccaaaaaggaggccatcctggccgccgcgctggaggcattttcgcaatttggtattcacggtacgcggctggagcaggtggctgagcgcgccggggtatcgaaaaccaatctgctctattactacccttcgaaagaggcgctgtatgtggcagtcctgcagcagatcctcgccatctggctggcgccgctgaaggcctttcgtgaggatatcagcccgctggtggcgatccgtgaatatattcgcctgaagctggaggtgtcccgcgatcatccccaggcctcgaagctcttctgcctcgagatgctgcagggggcgccgctgctgatgggcgaactgaccggggatctgaaagcgctggtcgacgaaaaatcggcgatagtctccggctggatcgaccgcggcaagctggcgccggtcgatccacagcatttaatctttatgatctgggctaccacccagcattacgccgacttcgccacccaggtggaggcggtcaccggcgccacgctgcaggatgcggccttttttgaacaaacggtcgataatgtccagcggatgattatcgaaggcattcgcgtccgttaattggcgggcggcagcgggcagctttgatcgccatcctcgcactgtagcagcgaggcgaggaaagactcccgctccacgctcttatcggtcatgcactggctgaccagcattggctgcatgctgccgccttcggcgccggacgcgagaaaggcgcagtcggcgtcgcggagggcgatccatgcctgctgcgcctgcttcagtaatgtttgttgtttacccaccgcccgctgcagggcctgctgccaggtgtcgttcagttttttatcggccgcctgatactgcgcggccgcgcactgattcatttcggtttgggtgttggcgctgctgcactcgtccgccagcgccgcgccgctggccagcagggccatcacggcaaataacgtgcgtttcattgttctgctcccataaaaaagctcccgtccgggagccttaattaaacacagctgacgtcggctgtcattagctgatcgcagcgcagactgattgcccggatggcggcgcaccgcgccttatccgggctaccctttggcggtggtaggtagccccggtaagcgtagcgccaccggggggcccgttttagccgatggtcatcaggctggcgttaccgcctgccgccgcggtgttaacgctcagcgaacgctcgatatacagccgctccagcagcagattggtttcgccgcgggcgaagccctgcacggagacaatcgccccgtcgcgcgccgccacctgctcgcacagctcgcgcagctggtcggaatcgccgtggtagataaccgcgtcgaaggcctggccaggcaactgctccgctttggcaaagcgaatgcgctcgctgacctcccgcggcagtttcttcgccagatcgcgctgcagggcgctgtccggccacagtacttcacaacccaccgccagcacagccgccagctggatcagcgcatcctgttcgttatccgctacgcacagcacgcgctcgcgcggcatcagcgtcagggtgttgcgctcgccggttggccccggcagcaggcgttgggtgccgctttgcgcctgctcgctgtactgctggcacagcgcctgcagctcaggacggcccgcggcccactgctgcagcgcctgcagcggtttttccagcagcgttttcagctgggcgtccagcggacgctccgcatcctggcgggcgaaggttacgccaaccgcgtcctgtggacggctggagagcagacggtacagatacagcggaccgccggctttcggaccggtaccggacagcccttcgccgccgaacggctgcacgccgaccaccgcgccaaccatattgcggttgacgtacaggttgcccaccttggcgctgccggtgacctgggcgatggtttcgtcgatacgggtatgcacgccgagggtcaggccgtagccagaggcgttaatctgctcgaccagtttgtccagctcgttacggttatagcgcaccacgtgcagtaccgggccgaagacctcttttttcagctcgtcgaagctgtcgagctcgataagcgtcggcggcacgaaggtcccgtgacgccattcgcgggcgtcttcgctattctcgcgcaccgcctggtagacggtgcggcctttggcgcgcatcgcctgaatatggcgttcgatattctctttcgcttccgcatcgataaccggaccgatatcggtggtcaggcgccccggattgcccatccggcactcgctcatggcgccgcgcagcatggttaaggtgtgatcggcgacctcttcctgcaggcaaagcacgcgcagggcggagcagcgctggccagcgctgtcgaacgcggaagccagcacgtcgatcactacctgctcggtgagcgccgacgaatcgacgatcatcgcgttcatcccgccggtttcggcgatcagcggcgtcgggcggccctggggatcgaggcggctggcgatattgcgctgcagcagggtggccacttcggtggagcctgtgaacatcacgccgcgtacgcgctcatcggaggttagcgcggcgcccacggtctccccgcgacccggcagcagttgaataacgcccggcggcacgccggcttccagcagaatcgccacgccctgggcggcgataagcggcgtctgctcggcaggtttcgccagcacgctgttgccggccgccagcgcggcggcaatctggccggtgaagatcgccagcgggaagttccacgggctgatacagaccaccggacccagcgggcggtgagtttcattatcgaaatcgtcgcgcacctggcctgcgtaatagtgcaggaagtcaacggcttcgcgcacttcagcgatggcgttgctgaaggttttacccgcctcgcgcaccaggatccccatcagggtcggcatctggctttccatcagcaccgcggcgcgctcaagaatggcggcgcgctcctgcggcggagtggcgaaccagatcggcgcattgttgatagcgctggtcagcgcctgctgcacttcagcgtcgctggcttcgcggacgtagccgacgatatctttcggctctgccgggttaaccaccggctgcatttcgccttcggccaccggctgctccagcatcggcaatgcctgccatttatgcagcgcgctgttgagcagggaagaggagagggaggccagacggtgctcgttcgccagatcgagaccggcggagttgctccggccgctgccgtagagatcgcgcggcagcgggattttcggatgcggcaggccggcctggccttcctgctgcgccagtttttctaccgcgctgaccgggtcggccaccagctcgtccagcggcagggtattgtccgcgatacggttgacgaaagaggtattggcgccgttctccagcagacgacgcaccagatacgccagcagcgtctcgtgggtgcccaccggggcgtagatccggcacggacggttcagcttgccgtcagcgaccttgcccactacctgctcgtacagcggttcgcccatgccgtgcaggcactggaactcatactggcccgggtagtagttctggcctgccagctggtagatagccgccagagtatgggcgttatgggtggcaaactgcgggtaaatcaggttcggcaccgccagcagcttcttcgcgcaggcgaggtaggagacgtcggtgtaaaccttgcgggtgtataccggatagccttcgagaccttccatctgcgcgcgtttaatttcgctatcccagtaggcgcctttcaccagacggatcatcaggcgacggcggctgcgggtggcgaggtcaatcaggtaatcaatgacaaacggacagcgcttctggtaggcctgaatcacgaagccaatcccgttccagccggccagttccggctcgaagcacagtttttccagcaggtcgagggagatctccagacggtcggcctcttcggcgtcaatattgatgccgatgtcatactggcgcgccagcagggtcagcgatttcagccgcgggtaaagctcttccatcacccggtcatactgcgcgcggctgtagcgcgggtgcagcgcggagagcttaatggagatacccggaccttcataaatgccgcggccgttggaggctttgccgatggcatggatcgcctgctgataagaaaccatataggcctgggcgtcagcggcggtcagggcggcttcgccgagcatatcgtaggagtagcggaaccctttttcttccagcttgcgggcgttggccagcgcttcggcgatggtttccccggtgacgaactgctcgcccatcaggcgcatcgccatatccacgcctttgcggatcagcggttcgccgctcttgccgatgatgcggttcagggagcgggagaggctggtctcgttatgggtcgacaccagttttccggtgaacagcagcccccaggtggcggcgttgacgaacagcgacgggctgcggccgatgtgcgactgccagttgccgttgctgattttgtcgcggatcagcgcatcgcgggtggctttatccggaatacgcagcagggcttccgccaggcacatcagcgccaccccttcctgtgaagagagggagaactcctgcagcaggctctgcaccataccggcgcggccgctggcggttttctggttgcgcagtttttccgccagctgatacgccagcttgtgcgcctgttcgcccagcggctgcggcagacgggcctgctccagcagcatcggtaccgcgtcggtttccggacgtcgccaggcggcggtgatcgccgcgcggctcaccgactgcggcaggatctgctcggcgaattcgaggaacggctgatagggctcttccgttggttcgctggcgtcatcgctttcgttggcggccccggagagcagggccggcagctcaggcagcgtctcgtcgttctccagtttttccagataattaaagatggcctgcttaatcagccagtgcggcgtgcggtcaatacggctcgcggcggatttaatgcgctcgcgggttgcgtcgtcaagcttaacacccatggtggtggtgcccatgctcaaaactcctgtcatttatcgttaggcttatgcggttgcatggaaatatccactatgttgcaactttgtgcaaccttgttaattgtggcttgtgacggaagccgtgaaatggctaatttgttaaaaataacccctaaaatagcagaaatttaaccccgggctcatagggtatttgtatgcgtgagttaacacttttgtttggtgcaacctttaaaaacgtgagagagtgcaacctctaacaaattgacgttttgcgccgtcggtttttcgtgtaaatgctgtgttaaatcgtttgtgaaaaaccgaagcttccgtcaggatacggtcgcccaattaaacaatgcgccattaccccgttccggtagtggaaaaaaacgacgaagttggacgctgtcgataaaaattctggagactttgcatggctattagcacaccgatgctggtgacatttattgtttatatttttggtatggtattgatagggtttattgcctggcgttcgaccaaaaacttcgatgattatattctcgggggaaggagtctggggccatttgtgaccgcgctttccgcaggggcgtcggatatgagcggctggctgctgatgggtctgccaggggcgatttttctctccgggatttccgaaagctggatcgccattggcttaacgctgggggcgtggattaactggaagctggtggccggtcgcctgcgcgtgcataccgaggtgaataataacgccctgacgctgcccgattattttaccggccgttttgaagataaaagccgggtgctgagaattatttcggcgctggttattctgctgttctttaccatctattgcgcttcaggaattgtcgcgggggcgcgtctgtttgaaagcaccttcggcatgagttatgaaaccgcactgtgggccggggcggcggcgacgattatctataccttcgtcggcggcttcctcgcggttagctggaccgataccgtgcaggccagcctgatgatttttgcgctgatcctcaccccggtgatcgtgattatttccgtcggcggctttggcgattcgctggaagtgattaagcagaagagcatcgaaaatatcgacatgctgaaagggctgaacttcgtggcgattatctcgctgatgggctgggggctgggttatttcggtcagccgcatattctggcgcgctttatggcggcggattcgcaccacagcatcgttcacgcacgtcgcattagtatgacctggatgatcctctgcctcggcggggcggtggccgtcggcttctttggcatcgcctacttcaataacaacccgagcctggcgggcgcggttaaccagaacgccgagcgcgtgtttatcgaactggcgcaaatcctgtttaacccgtggattgccgggatcctgctgtcggcgattctggcggcggtgatgtccaccctgagctgtcagctgctagtctgctcgagcgcaattaccgaagacctgtataaagccttcctgcgtaaaaacgccggtcagaaagagctggtgtgggtgggccgtatgatggtgctggtggttgccctggtggccattgccctggcggccaatccggaaaaccgcgtgctgggtctggtgagctacgcctgggctggcttcggcgccgcctttggcccggtggtcctgttctcggtaatgtggtcgcgcatgacccgtaacggcgcgctggccgggatggtgattggcgccctgaccgtgatcgtctggaagcagtttggctggctgggcctgtatgaaattattccgggcttcgtcttcggcagcatcgggattgtggtctttagcctgctggataaagcgccgtcggccagcatgcagcagcgctttgccgaagcggatgcccactaccatacgccgccgccggtacgcgccacggctgagtaagatcatctgatgctcacgagcccgccgctggcgggctttttattgcctggtgccgtgccggaatattataacccttgctaattatctgaaaatccgctgatatttcctgactaataacaatgaggatagcaaagatgacgttcagacagggtgcaatggcgctggtgctggcagggttactcagcggctgcgtggcgggtggaagttcatcgaccagcgcgccgaagcccggcgtctgcccggcggataagtccatggtgcaaaccacgctttacttcggtctgagccgcccggcggggaaagacatcaccgctgaagagtggcaacagtttgtcgaccgtgacgtcacgccgcgctttcgcgacgggctgacggtgtttgatgcccacggccagtggcttggccagaatggtcaggtggtgcgggagcagagcaaggcgctgatggtgatccatgggcatgacgcgcagagcgaggccggtattgaggctctgcgccagggctataaatcacgcttcgcgcaggagtcggtgatgcgtgtcgaccagccggtctgcgtgcagttctgagtaaacggcgggggcagccccgccgtttgttttacagcaccagcccggcgaagctggcggaaagcaggcttaccagcgtggcgctatacaccagccgcaggccgaagcgggagacgatattgccctgcggttcattcaggcctttgatcgccccggcgataatgccgatcgaggcaaagttggcaaacgacaccaggaataccgagagaatgccgagcccgcgaggggtcatgctggcggcaatcttttgcagctcaatcatcgccacaaattcgttagcgaccagtttggtggccatgatgctgccggcgtttagcgcatcgctcagcgggatgccgataagccacgccagcggataaaagacgtagccgaggatctgctggaagctgagaccaaacagggtggcgaatagcgcgttaatggcgctgatcagggcgataaaaccgatcagcatcgccagaataatcatcgccactttaaagccggccagaatatattccccgagcatttcaaagaaactctgcgattcatgcagcttctcgagttttatttcctgctcgctgcccggccgcgtcgggttaattaccgacagcacgataaaggtgctgaacatattgaggatcagcgctgcgacgacatatttggcctccagcatggtcatataggcgccgacaatcgacagcgatacggtcgacatggccgtcgccgccatagtgaacagtcgccgtgaggagaggtcgcccagtacgcccttgtaggcaatgaagttctccgattgaccgaggatcagcgagctgacggcgttgaaagattccagcttacccatgccgtttactttcgacagcagggtgccaatcacgcgaataaaaatcggcaggatccgccagtgctggagaataccaatcagcgcggaaataaacacaatcggacacaggacgccgaggaaaataaaggctaagcctttttcgctcatgccgccaaagacgaaattggtcccttcggcggcaaagcctaacagcgaagcaaaaaagccggaaatattttttaccagccacaggccgctttcggcgtgcaggaaaaagaaagcgagcgctatttcgataataatcaactggagaatataacgaatacgaattttttgtctgtcgtagctgacaagccaggccagggcgaggatcaccgccagcgccagcaggaaatgaaaaaatgcagtcatgttgttcttttcgcaagtcaataaggccgccatttagccatagccgctacggcgggtaaatatctggcgtaaaaaatcctttgcttattctttcccttcataacaggcgaatattttcataagtcattatttgtcagcgatttatttacaactgatcatcattctctgcacatttcgcttgtgtttctgagcattgtaatgataatcactatcataaatattacctgtttttgcattcgttgacggtgctttacatttaagggtattggcatgtttgtcccatttctcattatgttacgcgaaggcctggaggcggcgctgattgtcagcctgatcgccagctatcttaaacgcacccagcgcggcaactggattggcgtgatgtggattggcgtgatcctcgcggcggcgctatgtcttggcttaggcatttttatcaacgaaaccaccggtgaatttcctcagcgtgaacaggagctgttcgaagggatcgtcgcggtcattgcggtggtgatcctgacgtggatggtcttctggatgcgcaatgtctcacgcaacgtcaagcagcagctggagcaggccgtggacaaggcgctgcagcgcggtaatcaccacggctgggcgctggtgatgatggtctttttcgcggtcgcccgtgaggggctggagtcggtcttctttctgctggcggccttccagcaggatgtcggcatctggccgccgctgggggcgctgctgggtctggccaccgctatcgtgctgggcttcctgatctactggggcggtatccgccttaaccttggcgtgttcttcaaatggaccagcctgtttattctgctggtggccgctggcctggccgcgggggcgatccgcgccttccacgaggcgggcctgtggaacctgttccaggataccgccttcgatctgagcaacgtgctgtcgacgcatacgctgttcggcacgctgctggaagggatcttcggttatcaggagacgccgagcgtcagcgaagtggctgtctatctgctttatctgatcccggcgctggtgctgtttgccctgccgccgcggaataataccactgcctcgcgggctgcctgaccgggcgctgcgagcttataagcgacactctacttaccgaaagggatgatcatgatgattcattttcgccgtaatgcgctgcgggtgaccgtggccgcgctgctcagctctgcatttggtgctcaggctgcggatatcccgcaggttaaagtcaccgtcaacgacaagcagtgcgagccgatgcaggtgaccgttaacgcgggtaaaacccagtttattattcagaaccacagccagaaagcgctggagtgggagattctgaaaggggtgatggtggtggaagagcgcgaaaacatcgcgccgggctttactcagaagctcaccgcgaacctgcagccgggcgaatatgacatgacctgtggcctgctcaccaacccgaaaggcaaactgatcgtcaccggcgccgccaccaaagacgcggcgaaagcggatgcggtgctgagcctcggcgacgcgatcaccgcctataaagcctatgtgacggcggaaaccgcgcagctggttagcggcaccaaagcctttaccgacgcggtgaaagccggcgatatcgaaaaagcgaaagcgctgtacgccccgacgcgtcagcattacgagcgcatcgagcccattgccgagctgttctctgaccttgacggcagcatcgacgcccgcgaagacgacttcgagaaaaaagcggaagatccgaaatttaccggtttccaccgtctggaaaaagcgctgtttggcgataacagcgtcaaggggatggaaaaatatgccgatcagctgaacagcgatgtgctggagctgcaaaagcgtatcagcgagctggcgttcccgccgtcaaaagtcgtgggcggcgcggcaggattaattgaggaagtcgcggccagcaagatcagcggtgaagaagatcgctacagccataccgatctgtgggacttccaggccaacattgacggcgcgcagaaaattgtcgacctgctgcgcccgcagctgcaaaaagagaacagcgcgctgctggcgaaagtggacgccaactttaagaaagtggacagcatcctcagcaaatatcgcaccaaagacggtttcgagacctacgataagctgaccaccgccgaccgtaatgcgctgaaagggccgatcaccaccctggcggaagatctggctcagctgcgcgggatcctggggctggactaagtcgatggcacaacagaaaccccacgacgtgaacgaaccgtcacgtcgtcgcttactgaaagggatcggtgcccttggcggcgcgctggccatcgccggcggctgcccggtggcccatgcggcaaaagcggaaagctccccggggacgctggcacctgacgcgcgtcaggaaaaacagcccttctacggcccgcatcaggcgggcatcctcacaccgcagcaggcttcgatgatgctggtggcgttcgatgtgctggcggccgataaagccgacctcgagcgtctgtttcgactgctgacccagcgtatcgcctttttaacccagggcggcccggcgccggacacgccgaatccgcggctgccgccgatggattccggcatcctggggccgtggattgccccggataacctgaccatcaccgtctcggtcggccattcgctgtttgatgagcgttttggcctggcggataaagcgccgaaaaagctgcagccgatgacccgcttccccaacgattcgctggatgccgccctgtgccatggcgacttgctgctgcagatctgcgccaatacccaggatacggtgatccatgccctgcgtgatgtcatcaaacatacgccggatctgctgagcgtgcgctggaagcgggaagggtttatctccgacagcgcggcgcgcagtaaaggcaaagagactcccatcaacctgctgggattcaaggatggcaccgctaacccgccgagcgacgacagcgcgttgatggataacgtcgtgtgggtgacagccgatcaggacgagccggcctggaccgtgggcggcagctatcaggcggcgcgcatcatccagtttcacgtcgagttctgggaccggacgccgctcaaagagcagcagaccatctttggccgcgacaaacacagcggtgcgccgctggggatgaaaaacgaacacgataccccggattacagtaaagatcctaacggcgaagtcattgcgctggatagccatattcgtctggccaatccccgcacgccggaaacccagtccagcctgatgatgcgccgcggctacagctattcgctgggggttactaacgccggacaactggatatggggctgttattcgtttgctatcagcacgatctggaaaagggttttctgacggtgcagaaacggcttaacggcgaggcgctggaggagtatgtcaaaccgatcggcgggggctacttctttgttttacccggcgtagtggatgaaaaacactatctgggagagtcgctgctgcaggcctgataccaaccctgcccgtaagggcagggcgttttctgctgtttttctcatttttcttatatttcctgccatgtgttatatttctgtaatacaaatgaccgatagtctcctacacttgcttaagaactatttgttgcgtcattgtgaaaaataagttgcattaagaatcttttttgatgtacttattacatacgcggtagttcccggcagtgtgacgtttcactatggagatcgcgaatggtaaggtcccgtaccggacaacgtaaaacctcagaccgtactcttcagcacggaagccccgcttccggcagcgattttcttactctttctctctccgcttcgcattattacaaccttggcagggtacgcggtgcgcgtagccgcgactcgttgtcagttctaccggcaagcaatggcttacaaggaagccaaacctcaatcgttcgtgcgcatagtcgcgtcgatgttgacgcgtgtgatgtaaaccaacaacgcaaggtgctatccatgggaagacaaaaagcagtgatcaaagctcgtcgtgaagcaaaacgtgtgctgagacgggattcacgcagccataagcagcgtgaagaagaatcggtcacatcgcttgtgcaaatgagtggcgtagaagcaattggcatggcgcgggacagccgtgatacttccccaattgaggcgcgcaatgaggctcaggcgcattatttgaatgccatcgacaataagcagctgattttcgctaccggcgaagctggatgcggcaagacctggatcagtgcggcgaaggcagctgaagccctgatccataaggatgtggacagaattattgttacccgtcccgttctgcaggccgacgaagatctcggcttcttaccgggagatatcgccgagaagttcgctccctatttccgaccggtttacgatgtgctggtgaaaaggctgggggcttcctttatgcagtactgcctgcgtccggaaatcggcaaggtggaaatcgcgccgttcgcctatatgcgcggacgtacctttgaaaatgcggtggtgattctggacgaggcccagaacgtgaccgcagcgcaaatgaagatgtttttaacccgcctcggggagaacgtgacggtcatcgtcaatggcgatatcacccagtgcgacttgccctctggcgtgagatctggcctgagcgatgcgctggcgcgttttgaggaagacgagatgatcggcattgtgcgtttcaccaccgatgactgcgtgcgctcggctctctgccagcggacgctgaaagcctattattaatcgtcatactgtgagcaaggcccgggctagcccgggctttgttgtttttgggcatcctcccggcggcgctgcgcttagccgggctacctggcgggtagggtctggtagcccgggagaggcattgctgccgaccccggggatgtctgcggtgccacatgcgaaaaaaaagcccgtacatgcgtacgagctcttcttaaaatatggcggtgaggggggattgactcgcttcccggcggtactgcgcgtggccggactacctggcgggtagggtctggtagcccgggagaggcattgctgccgaccccggggatgtctgcggtgccacatgcgaaaaaaaagcccgtacttgcgtacgagctcttcttaaaatatggcggtgagggggggattcgaacccccgatacgttgccgtatacacactttccaggcgtgctccttcagccactcggacacctcaccatattgtcttgctgctcaccttgggtgggcaacggggcgctactatagggagttgcgttaaaacggtcaagcatattttcttctttctttgccgttcgctcacgcaatgaacaatgccccgctgcggctcagcggggcgggcgttttagcgctgggaatccagctgttcgttattcttcacgacgtcctgcgctttgctgtagctttcgatcagcagctggtaggccgggaagactttggtgtacacctccgcccattctgcggcgtccgggcgattccaggtgcgctgcagctcagaggcgatggcggcggtatccattggcactacgccggcctgtaccacgcgagccagggtgatctcttgcgccattttgctgtaggtgccggaagcgtcaatcacggcaaacactttataaccgtcggcgacagcggcgatagccgggaaggccatgcagacgctggtgatggtcccggcgataatcagcgttttacgaccggtcgctttcaccgcggcgacgaattccgggttatcccaggcgttaatctcacctttacgggcgatgtatttcgcatgcggcgcgttttcatgaatctccgggatcagcggaccgttcggcccctgcggcacggaggcggtcgtgatcaccgggatcccggcaagcgacgccatcttggccagcgcggcggcgcgagcgcgcagctctggcatcggcatatcgccgacggtctggaacagaccgctctgatggtcaatcaacagcattgcggtatcgttaacatcaatcaccggacgagcaccgttaaagttagcgggagtagacatagtattcacctcaatcagttagatttggccaaagcggccgctgttaaaatcgcgtacagcttctgcgatctgcgttttgttattcatgacaaacgggccatagcccacaatcggctcctgtagcggttctccggccatcagcagaacttttgccggggcggtcgcctccagatgcactgcgtcacctgcctggctcaggacggccagctggccttcgcgagcagattcggaaccgttaatgatcacttccccttccagcaccaccagcgcggtactccagccctccggttggcgcagcgtgaggtcgtgcccctgattcagctgcagatcccacacgttaagcggtgaaaaggtatgggccggaccgctgacgtcgtcatactggccggcaataacccgaacctgtccggcgccgttcgccagcgccacggtggggatcgtcccagcggtaatgctctggtagccggggggcgccattttgtctttcgcgggcaggttgacccacagctggatcatcttcagctcgccgccgctgcgggtgaaggcctccgagtggaactcttcgtgcaggatcccggcgcccgccgtcatccactgcacgtcgcctggaccaatcaccccgccgcgtccggtggagtcgcgatgctctacttcaccggcgtagacgatggtgacggtttcaaatccgcgatgcggatgctcaccgacgccgcgtttttcgctgcccgccgggaaggtgtacggcccggcatagtcgagcagtaagaaggggctcagctgctggccgtgcgtctgataggaaaacatcgagcgaaccgggaagccgtcgcctacccaatgctgcgcaggcgcggtgtagactcctgtgatctgtttcatggctttctcctgtgtatcggtatctgatgtgaataagcttatatccgggacgacgtatgcggtagtgagcaaaaatgacctatactgttccaaaaatggaacaatggaggaaggatgcaggatctcaatgacttcgcctggtttgtccaggtggtagaccatggcggtttcgccgcggcggggcgagcgcttgaccagccgaaatccaaactcagccgccgcattgcgcaactcgaggagcggttgggcgtgcgtttgattcagcgaaccacccgtcagttcgcggtcaccgaggtcgggcagaccttttatcagcattgcaaagcgatgctgattgaggccgaggcggcgcagcaggcggtcgagacgctgcgcgccgagccgcgcggtagcgtcaggatcacctgtccggtcaccttgctgcatgtccatatcggaccgatgctggcgcgatttatggcgcgctatcctggggtaacgctgcatcttgaggcgaccaaccgccgggtggatgtggtcggggagggcattgatgtggcgatccgcgtccgtccccggcccatcgaggatagcgacctggtgatgcgcgtgctggcggaccgcgggcaccggctggtggccagcccggatctcatttcccggctcggacgtccgcaggcgccgtccgagctgagcgcctggccgggactcagcctgggagcgaacaagcatcagcataaatggcagcttaccgggcccgggggagcgagagcggaagtgtatttcacgccgcgaatggtgaccaccgatatgctggcgctgcgcgaggcggcgatggccggcgtaggcgtggtgcagcttcctttattaatggtgcgcgatcagctggcgtcaggggaattagaggtggttctggacgagtggcagccgcggcgggaagtgatccatgcggtatttgcctcacggcgcgggctgctgccctccgtcagggcgctggtggactacctcagcgaagagtatcagcggatggaggaggattagcttcgggattggcttttctcgaggggctccccccccccggcagagaatattaaagaaaagagcccgtgcttgcgtacaggctctcatcttgaatatggcggtgagggggtccgccatattagtgtccggtaatgtacaccataattatatttttccattagtatacaatatgttgtcattattctttgtccggtaatgtattgatgttttgtttataatctgtcattttatgcagtacaggatgcactacagaagaatgatgataatgccaaagaaagccagaggactgtctgttcttgctgtttccagacttaaagctgatgggcgttatgctgttggtggggtggatggattatacctgcggattgcagggcgctcccgcgcatgggtcctgagtgtggcaatgggaacccgaattaacaaagcaggtaagacggttccccggcgtctgaacatggggcttggtccctgtcaggaagtttctctggcagaagcgcgtgacaaggcgcgtgaggtgcgtaagcaaattcgtgatggcattgatcccctcgaagaaaaacacgcccgtaaagcgtttcacgaagctcaggcgcgtaaacaaaaaaccttccgtgaatgcgctgaagctgtgctggaaatcaaaggtaatgagttaaagaataaaaagcatgtggctcagtggcgttccacactggaaacctatgcttatcctgttattggtgataaagcggtcagtgaaattaccaaaatggacttgttggcaatcctcgaaccaatatggctaactaaaaacgaaacagccagtcgtgtccggggacgtatcgaaacggtaatggattacgccaaagcaaaagagtatttcgaaggtgataaccctgctgcatggaaaggtgtactaaaacctctgttgccaatgccaagtaaagttcagaccaaaaaacatcatgcggcattgccttacaaagatgcaggctcatttatggcagaactgcgtcaacgggccgggatttcagccagagcactggagttttccatactgaccgttgcccgttcgggtgaaattcgaggcgctgaatggtgtgaaatcgatctggatgcgaaaacgtggattattcctgctgagaggatgaaagcagcgaaagaacatcgcgtacccctgtcagatactgctgttgaacttcttaaagccttaccacgatttacagataacaatcttgtttttccggcacctcgcggtggacaactgtcagatatgtcattaacagcagtattgaaacgcatggggcgtagtgatttaacccagcacggatttcgatccacatttcgtgaatgggcgggggaaaccacatcctaccagcgtgaagtgattgaacacgcccttgctcaccagttagcagacaaggcagaagccgcttaccagcgtggcaccttatggcctaaacgtgttgcgttaatggatgactggacaagctattgttctgtagcgtaaaacagctaaaaacagactgatggatagcagataatgaaaagaagtgaaatcaggaaagcgattgaatcgtggtttgacattgaacgctatgacgcaattgaacagctcactctgcagcagttctatgttgagattgaacggcgtatcttggcttacaggatgttgttgagccgaaataccataccgaccctgaacagattattgctggatgattagcgctataagatcctcagaggtgaaatctttttcagtggtgataccgctactcttggacatgagcttgccagaacctatacagtaaaccctacgactcgaagccatgcgcaattttacgcgaaaacgctggcattaaccgaagccacccccgaaatttcgtcgttaagccagtccgaattcctgtcagagtatctgaaagagacaccactgaaaaaccttgcccgtatcactgttgatattcatctggaagaggcatcaaccgaagacatcattgaacatctgaaggtgctgatcccgcaatggaagagacggcttaagatgaaggctccagcggatcgagagtatcgtttcggtaaaagcacgttcagaaaagttattgaatatcgccttattccgatgatggatctgattttttggggtgctgataataatgataccaagatcccactttccctgatgtcttcactgcttcatgaggacagtgataatgatcgtgatgaaggaatgctcaaggcaacggattacccactggcaatggcgttcctgacagatgaaagctatctgaagtcgcttgaagattacatcatgcaaaacaatcacttaaaagatacacctgttgataagcatgttgaggatgataagaagaagaaaaaagcagccaagtaaaaagggttacgttcgccgtgagcgaacgtgatcgcattcagccataacgaacctctttctgttcatctcccttcatatttttcaaaaaactcttttatgaacgcccctaaaacgtcataagcgaattcgctattattgttctcgtcgaaacaacatagagaaaaacgaaatctcatagagattacgtaaaataagagaggacaaacaatgaaagaaaatactgaaaacaacgtaaagcgatttatccgtgttccagatgttctaaaccgagtggggttcagtcgcactaccttatatgagcgtattaaggaagggaactttcctgacagggtaaaaataggaccaaggtgtgtcgcttttgttgaaagtgagatagatgaatggattgaagctactattcgaaactcacgtcagaacgcagcataaaaaataaataccgtttccgggtgaatagatatctttcgctcagggactcttattatcttaatcaataaaagggcaatgtatgaaaatagaatttaatacgacagagcagtttatcagtgaagcagcggattcgtataaccgttatatgaataaacgactacggaaccagcctgtgcatttctaccacctactgaaaaataagggggatatgaacgaagtgattgaaaatattatcgataaaacaaagagccgcttttatggggctgaaggtgaacaaaaaagtaacggatctccgggagcgttaactatgtgaaagtaaagcaacaccttcgtcagctttggattgtctttaagtgtgtataccgctgattcatccataaaaatatctactttaatattaaacaaaaaaggaaataaaaatgaatatatttaaaaataaatctactgaaatcttttatgttgtgtccttgcatatctacgcggagctttttaactcaaaggataaaacaaccagtaatatgattataacgcatgtaatggatcatgagtttgtcagtaaactaatcgatctggcgatgagaaatgcggagaagcatcttctgaaaaaagcatggaaaaagaacgctgatgaaaaactgtctgaggtggattttaaagaggttaagcaggcattagccaaaatgcattacactgttctggcggaatcaatatgttgatgtgttctgaagtctatctgccccttcatggggctgataacaaatctgatttgaaagctaaaaatggcaatgaaaacatactctatacaaggagccaaaatgattgatgaatttcatgtgatgtatatgtataaaaaaatccaagcagaagctgcaaccaccgacattaaaacacttgaacagcttttgaaaaagttcaggagggtggtcaatgaacgtcgtgaagaatactatcaggaaataggtgagaaaaaagcgcgtaagttgaaaatgaaaagagcacaaagattgcttgagaaaatggtgtgcgaccgagtttcgccagaagatttaagggcgtgactattagagatatttttgacataatcacatgaaaatgataatcattattgtctattgtgtctttttgtcgatagataggtgagcgaagggaatctggagggaactgtatgagctttgaagctaaaaaggaacatgccattgccatcatggaaagcaagaaaatgtggcgtagtaactatgcgcctcctttgctacgcctcgcatggaaagctggcctcaagatcccaccgttgccttttgccacgttctggcaaataaccttgctgatgggaggttggtttggtccggcatgggggatttgtatgtggttttcttcatggaaggacagtggtatgcagccgggcgttgcatttgtctcaagcatagtcgcaggtatttgctttggtgttcttatggctgcgtatcattggtggcgaaaggtagttaacaatctgcctgactgggatagtctggagtaaagatctctgtagtggctatataacctctaaatggactgagtgtgagatgggaaaaataaaatattggttaatagcgggatttattatccttcttgcaattgtttacactgctatcagtgacaggtattctacgctttctaggttgaaatcagcaggtgaaaacggagatgtagaagctcagtatgcgttgggtctcatgtatttatatggagaaatactggatgtcgattatcagcaggcaaagatttggtatgaaaaagccgctacccaaaatgatccgcgtgcacaggttaaactcggtttgatgtatgcaaatggtctcggggtaaatcaggattatcaacaggccaaatcttggtatgaaaaagcatcggttctaaatgatgttgatgcgcaatttttgcttggagagatgtataacgatggtctcggggtaggccaagactaccaacaggcaaagatgtggtacgaaaaagctgctgctcaaaatgatgagcgtgctcaggtcaatctcgctgttctatacgcaaagggtaatggggtagaacaggattatcgtcaggccaaaagctggtatgaaaaggctgcagctcaaaatagccctgatgcgcagttcgccattggaattctgtatgccaatgctaatggtgtagagcaggactatcagcaggcaaaagactggtatgagaaagcagcagaacaaaatttcgccaatgctcagtttaatcttggtatgttctattacaaaggtgagggagttaatcaaaactttcagcaagccagagaatggtttgaaaaagccgcgtctcaaaatcagctgaatgctcaatataatttaggtcagatctattactacggtcagggcgtaactcagagctatcgaaaggctaaggaatggttcgaaaaagcagctggggaaggtcatgtcgatgcccaatataaccttggcgtaatatacgaaaatggtgaaggggttgggcaggactttcatcaggcgagagcttggtatgaaaaggcagcttcgcaaaacgatgcgcaggcacagtttgatcttggtgttatgaatgagcttggtcaggggggaagtataaatctgaaacaagcaagaacttggtttgggctggcatgcaataatgggcataaggaaggttgcgaacgttatgaaaataattgaaatggttttttaggggattttttgtcataactaaatttaattttagctttataatttattttgattcttttttgatatgcaaaaatatagtgtgaggagaggggcgataaataatatacaaaacattaatacgaataagaatagttagtagtaaatgggttaaagcctctggaacttcaggattttttacaatgaacaaaggcgtttgcttggttaataacccggaaacaaacacctgctcatgtcagtcaggcactgtagcgaaagaattgttttatacaacagcaactgaacagttaggtggtggtagccatggtggcggcataacagtggtaaaagagagagtattatatcaatgtagataaggatgattgtcttattatactttattttatgcaagataaattnnnnnnnnnnnnnnnnnnnnnnnnnnnnnnnnnnnnnnnnnnnnnnnnnnnnnnnnnnnnnnnnnnnnnnnnnnnnnnnnnnnnnnnnnnnnnnnnnnnnnnnnnnnnnnnnnnnnngaaaatattagtattgtccgttttatttggtttttcaactatgtcccatgctagtgaaccaaagtatgcttttccgcaatcagataaacaggtagtctcaaaaattaaaattcaaaatgcaccgataaatcatgataaatatggtcatggtgaggttcttgccaatggggcgtgggttaaaggaaattctggtagtcaaaacaaaaaatgataggctcacttattttaaataaataatccgatggatatataggtgagtagaaatcgttagataaagttgaaatagtggcttgacttaagaataaagagtgctatatctatttgtagctaacatttttttaatttggctgccagatgttttaattttttgctcacattgatgttaggttgttatataccttgtcctgatattctaaaatataactatccttttgtatggtattacaaggcgtcaggaacttggtttgatcctcctgacagtctgttgtggaggattaaatttatccagagtaagcgattatgatggtttttatnnnnnnnnnnnnnnnnnnnnnnnnnnnnnnnnnnnnngttatgtttaataagtgttttctgtgaatattcacttcatgaaatgtctgattactctacgtattgggatatgtattttctccaacggatagttcccttaatgggaaatgaaagggccgaaaggccctataactaattacatattgttaactttttacttccactaatgttctttttttctcaatttcttagcaagcttggggtaatatattttgtgaccatcctctttgggccagcagactgatactgcatagaatagtaatgctgaagaaattaatagaccaatgagataatgtggtgttgtaggatcactgtgttttgattgttcccataaccagtcaataaacatccgactggaaccatttgatgcagataaataccactctattgagaaaacaaaaattgttccaaaagagattatttcagctgctctcccttctttataatttttctctcttttgctttgctcttcagtatacaattttaatgacatgtcgtcgccattttctaaagcatcatctcgtagttctgacataaaaacttcagtagatgatttttggtagatcctctcatctttactttgtagtagattactatacttaattcgtatcagaagtagattaaagcatagagatgttatttctaatattattgatgagaaaattcctaaagcaataatcattccggccaaatctgcaagtgaaagatcgaattccttccctaattttatgccaaataaaccatttccttttagatagaaaaatagaacatcaaaacatagtgtgaaataaattaattttgctactttcgctaaatcccacaatccatctacaaagcttaataccgaaaatgttgaactactattactggatgacatatattgcctctttcagcttttgataaacttcttatattaatgagttaaagaagggaggcaagccatccttggctttcaattctttacttgtgatgagcaaattcaaacggcctgaccataccgttgctgttagcatcaaggaaatcagcaaccactggagcatcaggtgtcgctgcttaaggtgcttggttttatggttataagcaacccggattctgttgctttccttatggtccacttgatgctttacagcgtcttctgaccacaaacctgactcaattaaggcactacaggccagcgtgtgaaaaccttgtccacagatgtcctgtgtggtgttttcaatcagaacagctaaaacatggcaagacaataccccgaccactcatccatcaacgccacccgcttaggccataaggtcccacgttgatatgctgcttcggctttatctgctaactggtgagccagtgcatgttcaatgacttcacgttgatgatcggttgtgacatcatcccagtcacgaaaagtggaacggaaaccatgttgagttaatcctgaatggttcattctctttaagactgccaacagcgacatatctgatagttgtccaccacgaggggctgggaacacaaggttattgtctctgacatgtggtaaatcctttaacagggcaaacagcagtatccgacaacaggacttgctgttctctacccaccacccgccagagataacttattcaatcttttctggggggcagatggaggggagttgttttcatgtgttctatgaccagttcgctacattaatcaaagctttatttttaaagctttgatcaggaaaatcacagcaaaaacaggaagttcagatacaaaaaaagtccgtttgaacggacttttttatgcagcattttatgcagtacaaaaccaaaaatgcgttgtaactaattgattttgtgttaaatatggcggtgaggggggattgactcgcttcgctcgcccctgcggggcagcccgcttactgcgtgcgcggtctgtccaactggctgcgccagttgtcgaaccccggtcgggggttctcatcccccctgcggagaatataaaagaaaagagcccgtacttgcgtacgagctcttcttaaaatatggcggtgaggggggattcgaacccccgatacgttgccgtatacacactttccaggcgtgctccttcagccactcggacacctcaccatattgtctttcccgttgttgtcgggaacgggcgctaatgtagggaaatacgtatcgcccgtcaatcaactttttgcaaaaaaagcgcgtttagacaaacttcgagcaacttgctccttaaacgtgcgaaatccgttttttttgtcgccagtagcttttcccttttcgctccggggaaatttgttatgctggcaaaccaatagaaaacaatgagtaaaataagacgccagcgtcaatcggccaaaggcgtctgctatcaggagcccctatggagattattttttaccatccgacctttgatacccaatactggatctgtgagctggaaaagcagttacccggcgcgcgggtgcgcgagtggaaagcaggcgataaccggccggcggactatgccctggtctggcatccgccggtagagatgctgcagggccgggcgctgaaggccgtgttcgccctcggggcaggggtggactctattctcagcaagctgcgcgaccatccggatatgctgccgctgtcgattccgctgtttcgtctcgaagataccggtatgggacggcagatgcaggagtatgccgtgagccaggtgctccactggttccgccgctttgatgactatcaggcgctgaagctggcttcccgctggcagccgctgcccgagtaccgcgccgacgaattcaccgtcgggattatgggcgccggcgtgctgggggcgaaggttgcggaaagtctgcaaccctgggggttcccgcttcgcgtctggagccgtagccgcaaatcctggccgcaggtgcagagcttcgccggccaggccgagctgggcgaattcctgcagggcactcgcgtgctgatcaacctgctgccgaataccgccgaaaccgccggcattattaaccagacgctgctggcgcagttgcctgatgagagctatgtcctcaaccttgctcgcggcgtgcatgtcgttgaagaggatctgctggcggcgctgaacagcggtaagctcaaaggggcgatgctcgatgtcttcagtcgcgaaccgctgccgcaggagagcccgctatgggcgcatccgcgggtggccatgaccccccatgtggcggcagtgacccgtccaatggaagctatcacctacattgcggagaccattagccggcttgagcgaggggagccggtaagcggtcaggtcgaccgccagcgcggttattaagacgagagaaccccgccacggcggggtttttgctaatcaatagcccggtttcctgctattcttgcggcaaacagaagaggagaatgtgatgtatcccgttgacctgcacatgcataccgtcgccagcacccatgcctacagcaccctgcacgattatattgcggaagcaaagcgtaaagggatcaaactcttcgccatcaccgaccacggcccggacatggcggatgctccgcactactggcacttcgttaatatgcgcatctggccccgcctggtagacggggtggggatcctgcgcggtattgagtcgaatattaaaaatattgaaggcgagatcgactgttccggaccgatgttgacttccctcgatctgatcatcgccggatttcatgagccggtgtttccgccgcaggatcgtgacacccatacacaggcgatgatagccgcgatggccagcggtaaagtgcatatgattagccatccgggtaatccgaaattcccggtggatatcccggcgattgccgaagcggcggctcgctaccaggtggcgctggagattaataactcctcgttcgtatcatcgcgcgtgggcagtgaagacaactgccgggccatcgccgccgcagtgcgtgatgccgggggatgggtggcgctgggctcggactctcacaccgcctttaccctcggggagtttaccgaatgccgcaagatccttgatgcggtcgatttcccggaggagaggatcctcaacgtttctccgcgtcgcctgcttaacttcctcgagtcgcggggcatgccggcgatcccggaatttgctgacctttaatttgtataactggaataactgaatgaacgagttttcaatcctctgccgcgtgctgggttcgctgtattaccgtcaaccgcaggacccgctgctggtgccgttgtttaccctgatccgcgagggcaaactggccgccagctggccgcttgagcaggacgagctgctggcgcgtctgcagaaaagctgtgaaatgcaatccctggcgacggactataatgcgctgttcgtcggtgaagcctgcagcgtcccgccgtaccgtagcgcgtgggtggagggttcctcggaagcggaagttcgggcttttctgagcgaacacggcatcccgacaggggaaggtccggcggatcatctcggctcgctgctgctggccgcctcctggctggaggatcatgccgcagaagaccagagcgagacgctggagctcctgttcgccgactatatcctgccgtggtgcgggacgatgctggggaaagtcgaagcccatgcgcacacgccgttctggcgcaccatggcgccgttgacccgcgacgccatcgccgcgatgtgggacgagcttcaggaagaagatgagcaataatatgtgatgcaaatcactgtttgaatgaaactgaaagaaagttcattcatatactgtgttttagatcgcattcttccggcgcgtatctgctaggatacgcgccatgaacatactcttcgcaatcgcattaacgacaggcatcctctccgggatttgggggtgggtggcggtcgctctcggcctgctgagctgggccggattcctcggctgtacggcctatttcgcctgcccgcagggcggcttgaaagggctggccatctcgtcctgcacggtgatgagcggcgtggcctgggcgttagtgattatccacggtagcgcgctggcgccacaggtgcagatcctcagctatatgatgaccggtgtggtcgccttcctgatgtgcattcaggcgcgacggacgctactgtcgtttgtcccgggcacctttatcggcgcctgcgcgaccttcgcggcagacggcgactggcgtctggtgatcccttccctggcgctgggtctggtctttggctatgccatgaaaaatagtggcctgtggctggcggcccgtgcggataagcataaattgttcgtcaacgacaacgcctgatcggcgggacgactaaaaaacaggaccttacgggtcctgtttttttatcttctcgtcaccggacaaagcgatagtcttgctcccgcaggcgagaatgccctagtatcggcagaaagccgtatccacacgctatgccgacaggaggagaaatggctgttaaacctgaggtaattctcggcgatattacgacacttgatgtcgatgtgattgttaatgcggcaaatccctcgctgctgggtggtggcggagtagacggggccatccaccgggcggccggtcccgcgctgctggcggcttgcaagcaggtgctgcagcagcagggcgaatgccctcccgggcatgcggtaattactattgccggcaatctgccggccagcgcggtgatccacaccgtgggcccggtctggcacggcggcgaccgcatggaggcgcaaaccctggccgatgcttacaaaaacagtctgcagttggcctcggcaaataactatcgctccattgcgtttccggcgataagcaccggcgtgtatggctatccgaaagaggaagcggcggcgatcgccgtgcgcaccgtcaccgcgtttctcactcgctataaccctcttgagcgcgtcctgttcgtctgttttgacgaggaaacggcggctatctatcgccgcctgctggcgtcatacccctgattcaacagaataggctatgataaccgccagtcttgacgggaatgatgggtagcaggagggagcagggtgtcagaaggaaaagtccagcagaaacagcaggcgcgccgcgcggagatcgttgtcgctgcgcaaaaatgtttcgctgaaaaggggctgcacggcgcttccgtcgccgatatcgcccgggaagcgggcctgagcgtcggtcagctatatcgcatttttgccagcaaggaagcgatcatcgaagcgattgttagcgaaatcgtcaacgccagagtcggggagatgatcgatgagaaccacaatctggcgcgtaaagcggcggttttggctggcaggatcccgacgtcggcagccaccaaaagcgataattatctgctgatggagatcaatgccgaggcctcgcgtaacccccgcttgcgtgagatcctgatgcaggccgatcggcggttgaaagaggagggcggtcgcctgtcgcagcgctaccatcccgggctcagcgatgcgcgacgcaatgccgcatcagagctcatcgccgttctgacagagggggcagcctaccgctgtgagctgagcgcctccaccccggtcgataaggcagatttagaagccctgtacaatatgattttcgaccggctttttgacgagcaggcataatacggcacgcctggcgtgccgcacaggctaatggttagctggccgaggctggggttttggccggtttgttcatcggtttaccggagaacaggaaacgcagcagcggaatgcgcaggtgaatttcatacaggatcagggcaatacccaccacaaaaaccaacccgccaataaagcctaaggtattggacttaatgaccggggtgatccacgccccgtacagcagcgtcagcggatggtgcaccaggtaaataaacagcgaagcattgacgaaataggttacgcgcgccgactggaagttcagcaggcgatggccgagcgaaaagaccacattgaccatccacagcccaagcaccatggtgatcaccgattccgtttcatacatccagccgtcgccggagccgtactgctggttcagccggtaggcgataaatcccagcagcgccgctgcgcagcaccatggtgacggggtggtaaacatcgccttcagacgcggattaataaaggtctgcgcccccagcacaaagaagggaagatagaacagcgtctgcatcaccacaaagttaaacagaccattgctaagcagcggcgggtaaatcaggaacagcgatcggcggatcagcgcgtaaagcacccccagcgcaaggaaaatcatcgttagctggcccatagtgacagtgtcaccaaaggctgaggcaccccctgttgggcggcgcgtcagccatttaaacagcaccacgcccagcgaggtcagcaccaccagcaccagtaaaaaccacaggtgggaaataagctcccacgccagggtgttaaatttgtcgtacccggaaagggtgtgccagttttccgccttgccgttgacgtactgcagcataataaactgcggcagcgtcagcagtgggatagcggtcagcatcggaataccgacccgttcgacgcgcactttccaccactttttcaacgggtagcgcaggaacagcatgtaggagaaatagccggagatgacgaaaaagacctgcatccggaaggcatggatgaagtcattaaacagcgtcaaccaccacgagggctcagcgctgttgacatgccagctgtggctggaatagatcagcgaaatgtggaaagggatccccagcagcatcagccaggcgcggatgctgtcgaagaaatattcacgctgtaccggagtattattcatacgattcacgacaatctcagataattcgtcttatcactcaagatgataacgcttacattatcagcaaccctacatgaactcggggtacctgtctccaggataagcacgcaaagtgcaaacgggatagcgaactgtttattccctgcgccgctacgctgaacaaagcagggattatgttgtcggattgcctgagtttccattaaaatagatcggatcgatttaagcacacaaagggggaagtgcttacttatatgaaacataaaccacagatgatgaaaatgcgttggttaagcgcagccgtaatgttgtccctgtgtacttcatctgcatgggcatttagcattgatgacgttgcaaaagaggccaaaacgttagccgggaaaggctatgaagcgccgaagagtaacctgccctccgctttccgcgacatgaaatacgcggattaccagcaaattcagtttaatcacgataaagcttactggaataaccagaaaaccccattcaagcttgaattttaccatcagggtatgtacttcgacacgccggtcaccatcaatgaagtgacggccaccagcgtgcgcaaaattaaatatagcccggactattttaactttggtaacgttcagcacgataaagacacggtgaaagacctcggtttcgccggcttcaaagtactgtatccgatcaatagcaaagataagaacgatgagatcgtcagcatgctcggtgccagctacttccgcgtgctgggtcagggtcaggtttacggcctgtccgcgcgcggcctggctatcgataccgcgctgccgtccggcgaagagttcccgcgttttcgcgagttctggatcgagcgtcctaaagccaccgacaaacgtctgactatctatgcgctgctggactccccgcgggcaaccggcgcttatcgctttgtcatcatgccgggacgcgacaccgtggtagatgtccagtccaaagtttacctgcgtgacaaagtgggaaaactgggcgtggcgccgctgaccagcatgttcctgttcggttccaaccagccttctccggcgcttaactatcgtccggcgctacacgactccaatggtctgtcgatcctggccggtaacggcgagtggatctggcgtccgctgaacaacccgaaacaccttgccgttagcagctatgcgatggaaaacccgcaagggttcggcctgctgcagcgcggccgtcagttctcgcgcttcgaggatctcgacgatcgttatgacctgcgtccgagcgcctggatcaccccgaaaggggagtggggcaaagggaaaatcgaactggttgaaatcccgaccaacgatgaaaccaacgataacatcgtgacttactggacgccggatcagctgccggagccgggcaaggagatgaacttcaagtacaccatcaccttcagccgcgatgaagacaagctgcatgcgccggataacgcttacgttatgcagacccgccgctctaccggcgacgtgaagcagtcgaacctgatccgccagccggacggcaccattgctttcattgtcgacttcaccggcgccgatatgaaaaaactgccggcggataccccggtcgccgcccaggcgagtaccggcgataacgctgaaatcgttgaaaataccgtgcgttacaatccggtgaccaaaggctggcgaatgatcctgcgtttgaaggtgaaagatccgaagaaaacgacggaaatgcgcgccgcgctggttaacggtgatgacacgttgagcgaaacctggagctatcagctgcctgccaatgaataagataacaaagtacattgacgcattgccgctgtcggacgccgagaaatcggcgctgccggacaccagcctgcaggccgttcatcaggccctggatgacgaccatcagaccttcgcccgcgaagacgactccccgctggggtcggtcaaggcacggcttgcgcacagctggccggattcgctgtctggcgatcagctggtgaaggatgatgaaggccgtactcagctgcatgcgatgcctaaagccaagcgctcctcgatgatcccggacccgtggcgtaccaacccggtcggccgcttctgggaccgtctgcgcggacgcgatgtcacgccgcgctatctctcccgtctgacgcaagaagagcgcgagagtgagcaaaaatggcgtaccgtcggcaccattcgtcgctatatcctgctgctgctgacgctgtcgcagaccgtagtggccacctggtatatgaaaaccattctgccttatcagggctgggcgctgatcaacccggccgacatggtggggcagaacctgtggatctcgttcatgcagctgctgccgtacgtgttgcagagcggcattctgatcctcttcgcggtgctgttctgctgggtttccgccggcttctggaccgcgttaatgggcttcctgcagctattgatcggccgcgataagtacagtatttccgcctcgacggtcggtgacgaaccgttgaacccggcgcaccgtacggcgctgataatgccgatctgtaacgaagacgttgaccgcgttttcgccggcctgcgggcgacctgggagtcggtgaaagcgaccggtaacgccgctcatttcgacgtctatatcctcagcgatagctataaccccgatatctgtgtggctgagcaaaaggcgtggatggagctgattgccgaagtgcagggcgaagggcagatcttctaccgccgccgtcgtcgtcgagtgaagcgtaagagcggcaacatcgatgacttctgccgccgctggggcagccagtatagctatatggtggtgctggacgctgactcggtgatgaccggtgagtgtctgagcagcctggtgcgcctgatggaagcgaacccgaatgccgggatcattcagtcttccccgcgcgcctcgggcatggacacgctgtatgcgcgttgccagcagtttgccacccgggtgtacggtccgctgtttacggcgggtctgcacttctggcagttgggggagtcccactactggggccacaacgccattatccgcgtgaagccgttcattgagcactgcgcgctggcgccgctgccgggcgagggcaactttgccgggtcgatcctgtcgcacgacttcgtcgaagccgcgctgatgcgccgtgccggctggggggtgtggattgcctacgatctgccgggctcctatgaggagctgccgccgaacctgctggacgagctgaaacgcgaccgtcgctggtgtcagggcaacctgatgaacttccgcctgttccttgtcagagggatgcacccggttcaccgggcggtgttccttaccggcgtgatgtcctacctgtcggcgccgctgtggtttatgttccttgccctgtcgacggcgttgcaggtggtgcatgccctgaccgaaccgcagtacttcctgcagccgcgtcagctgttcccggtgtggccgcagtggcggcctgagctggccatcgcgctgttcgcctcgaccatggtgctgctgttcctgccgaagctgctgagtattattctggtgtggtgtaaagggccgaaagagtacggcggatttatccgcgtcacgctttcactgctgctggaggtcctgttctcggtcctgctggcgccggtccgtatgctgttccacacggtcttcgtggtcagcgccttcctcggctgggaggtggtatggaattcgccgcagcgtgatgatgactccacgccgtggggggaagcctttatgcgccacggctcacagctgctgctggggctggtgtgggcggtcgggatggcatggctggatctacgcttcctgttctggctagcgccgattgttgtctcgctgatcctctcgccgttcgtatcggcaatttccagccgggcgacagtgggcctgcgcaccaagcgctggaagctgttcctgatcccggaagagtattcgccgccgcaggtgctcaaggataccgatgcgtacctgacgatgaaccgtcagcgttcgctggacgatggctttatgcacgcggtgtttaacccgtcgtttaacgccctcgccaccgcaatggccactgcgcgccaccgtcaggggcatatcctggagatcgcccgcgagcgccatgtcgagcaggcgctgaatgaaacgccggataagctgaaccgcgatcgccgactggtgctattgagcgacccggtaaccatgtcgcgtctgcactatcgcgtatgggccgcgccggagaaatactcttcatgggtgaacgcctatcagcagttggcgcttaacccgctggcgctgaaaacgaaataagccgtacgttaaggaaaataccggcagcgatgccggtatttttttatctgaaatacgaggatgtggatgcgaatactaccgatcattgccatggcgctgctgctcagcggctgcggcagcattatcagccgtacggtgcccgggcaggggcatggcaatcaatattacccgggcgtacagtgggatgttcgcgattcggcatggcgctatctcaccattcttgacctaccgttctcgctggtatttgatacgcttctgctgcctctggacgccagccacggcccctataactgattaacgctcgtcccactcgtcggctgccgtctgcccctcttcggtgtccagcgagggctcgagctgaaattcgccttcatcccattcgtggagcgtattttcctccagccactcctgacgcagctctatctcatcataatccccgtcgaagacgctctgcgcggcttcgccgctgagcatcgggaggcattcgccttgttcctcttcgtcagcaaaaaattcggcctgccaggcgatatcgccatcctgcagcacatacttttgaatgttgagctgctcaacgttggcgctctcttcatcgctgtcagggttgttggcgagaaattcttcacgtgctgcatcaatagcttcttcaagcgtggcgtagaacatcgaatcctttggcatagcgaatctcctgagaagaatatgaattgaacacgattcaatctatagaaggcggtacgcacggcgtcaagggacagagcccctctcgacgttaatttactgaatgcgaagtatccgcggctggccgacgcaggctgagggtggagtagatcgcattaaataataccacccctgcggtgaccagaaatacagcgcggaagccatagttagcggaaaccgacgcgccaatcagggggccggtaacgttgccaatatcgcggaacgactggttatagctgaagattcgcccggagatctggctggtggagttgtacaccagcagggtttgcaccgccggcagcagcgcgccgtccgcggcgccgagcaggaatcgcaggatacctaactgcagcggggtctgaacgaacgacatcgggatcaggagtagcaccgagataatcagcgccacgatgaggattttttccggcccgatgcgatctcccagtttgcccagccgcggggcgctcatcagcgcggcaatgcccggcaccgaggcgatcattccgctgataaaggcgatgttactgacgttgcccgcgagatcgcgtacataaagcgtcaggatcggcgcaatggaaccggtggccacctggattatcagcgaggtcacaaacaggctgagcaccagtttgggattctgcagcgaggagaacacctctctggcactgagcatctctttcctggcgatcggcacaaaattttcgcggattaaaaacagggtaaacaagaaacagataaatagtaccgccgcggtcataaagaagacggtgcgcaatccccagtggtcggccaggaagccacctgccagcgggccgagcagggcgccgcttaccgcgccggtagacagtgtccccagcgcccagccgcttttatggcgcgggatctgggtggcgatcagggcgttggcgttaggaataaaaccgcccagcaggccgagcaatgcgcgcagcagcagaaactgccagatattctgcgccattcccatcagcatcatcacgatggccatcccgagggcggaacgcagcagcatgatttttctccccttgcgatcagcaagcccccccagaacggcgaggcgatggcggagaaaagaaaggtaatactaaagaccagcccggaccacatgttcagggcgctatgcccggtgacgccgagctgttcgacgtagagtggcagaaagggcatgaccaggctgaaggcggcgccggttaaaaagcagccaagccaggtcacggtcaggtttcgtttccagttaatgggggtttcagcagacgacatagggttccactggcctgcgcggcaggtcaaattaagagaaaatatgagcctgctaattatgcgcctgagaaatagatgccgcaatggaggagagcttttaaagctaaaggagagcctaaagcctgagcggcgaagcttcccggccgggatgagcgcggccgggaaaagggatcagtagcgggagggcatgccttcggggcgggttttgaagcgacgatggagccacatatactgttccggggccatcatgatgcactgctcaacgatcttgttcatccacgcggcggtggtttccgcgtcgtccagcggcggggaacactctggcggcaggataatcagttcataacctttaccgtccggtttgcggcgcgggacgaagggcacgatgcaggctttggacattttcgccagcatccaggtgccggaggtggtcgccgcctggtcgaccgcaaacagtggggcaaagacgctggcggtcgggccgtaatcgtgatccggtgcgtaccacaccacttcgccttttttcagtgcccggatcatgcctttcagatccttacggtcaatcatgtccttattggatcgtagccgaccccaggtctgcagccagtcgatcaccgggttgtcgttggggcgatagacgccaatccccggttcgttcataccgaacatccgcgcacccatctcgagagtgaggaaatgaataccgatcagcagaatgccgcgctgctgcgcctgcacatcgcgaatatgctcaaagccgatggtgtcggtccagcgggcgatacggcgaaccggccagaaccaggccataccggtctccatcagccccatgcccaccgattcaaagttcatcaccaccattcggtggcgttcctgctcgcttttctcggggaagcagagctcaaggttgcgataggcgattttcgcccggcgcttcataaagcgcatggccagacggccgatggcgttcccgaggcggtagatcagcgggtagggcagttggacaaccagccacagcaggccgatacccagccacagcagccaatagcgcggatgcaacagcgccggagaaaatttaggcaaatgagtcatttcatacccgtatcagtgagcaacgtcttatattatcgcatttttttaccggccagccaaaggcggcgacagtcagctcgttttgttaagcggggcgcgaccgggtgagagaaatgtagcgtaaaatgtagggatgtaaattaattagctttgctatatcatgcccgccgtttatttcctcatttctatgtcgagcaggtacaccatgccagtgttacacaaccgcatttcaaatgagacgttaaaggcgcaaatgctggctgaaaccgagccgcgcacgacgatctcattctataaatatttcaccattgtcgacccgcaggcgacccgcgatgcgctgtgggttgccttaacccagctgaaggtctttggccgcatctatctggcccgggaagggatcaacgcgcaaatcagcgtgccgcaaagcaacgttgaggctctgcgtgagtttctctatggcttcgatccggcgctggcggggctgcgtttcaatatcgccgtggaggacgatggtaagtctttctgggtgctgcgcctgaaagttcgcgatcgtatcgtcgccgacggcatcgacgatccctcgtttgacgcctccaatgtgggggagtatctcaaggcggcggaagtcaacgcgatgcttgacgatccggatgccgtgtttatcgatatgcgcaaccactatgaatatgaggtgggccatttcgaaaacgcgctggagatcccggcggataccttccgcgaccagctgccgaaagccgtggaaatgatgcaggaccataaagacaagaaaattgtcatgtattgcaccggcggcattcgctgtgaaaaagccagcgcctggatgaagcataacggcttcaataaggtctggcacatcgagggtggcatcatcgagtacgcccgtcgcgcccgcgagcaggggctgccggtgcgtttcattggcaaaaactttgtctttgatgagcggatgggcgagcggatctccaatgacgttatcgcgcactgtcatcagtgcggcgcgccgtgcgacacccatactaactgcctgaacgatggctgccatctgctgtttatccagtgcccgagctgcgccgagaagtttgccggctgctgtagcgaagcctgcatggaagagcataagctaccggaagaggagcagcgtaagctgcgcgccgggcgtgaaaacggcaacaaaatctttaataaatcccgtggccggctgaataccaaactcgggatcctcgacccggagccgtcagaaaaaccataaccagacgagatcgatgatcgccagcagcagccagagcgccaggtagatcataaaatgctcgcgcacgttgttgaccagcatattaaacaggcgacgcataaccgctctcaatcactaacggcctcagcagaggccgtttctttacccaacggcaaaagtgccgcattccattacgcgttaaagcgcgccagagaaaagggggccagattgaagctcggtgcttcgccctgagcaaactgactggcaatttcgcccagcaccggcgcaaacttaaagccgtggccgctcagcccggtgatcagcagcgtgtctggcctgcctggcaacgtatcgataataaagtcctcatcgacggtattgtcgtaggtacaggaggcgccgtgcaggcagccgccgatgccaggcaggacgttacgcaaaaacgggaaggattcggaaccatcgctggcgacagcgccaaacgctaccctttcctgcggggtggagatcggctggccgccgttatgcttgccaattttcagttcattatcttccgccgggaaaccgtaatattgatcgccgttgggcaactcgccggtgaaggccgggaagtgattcttgctgctgtaacggccatcggcctggtaccaggcgaacaccttgcgtaccggctggatagggaggtccggaagcaggcgggtgacccaggtgccggcgctgaccagcagctttttaccatgatattcaccgtcgagggtatcgatggtgatcccgtcagcatggtgatgaatagccgagaccggacagttgaatagctgcgcgcagcctgcttcccgcgccagacggatccaggtttcgacggccagttcgctgcgcagtacgccggaagcgggttcgaaaatcgcccgatagtcatcggggaggcgtatctccggccagcgctgcatcacggcctgggcatcaagctcttccacctcaagctggaacgcacgggcgctggcggcgacgttggcgagaaaagcggagctggcggggccgaggttaatgacgccggtgcgttcaaacacggcttcgccactgatctctgccagttcgtcccatagctgctgggcacgcagcaccagcggaacatatttctcaccttcgccataggcgtgacggataagacggctgctgccgtgatggctgccttcctggtggggaggttgatgggcatcggtcatcagaacattgagtccggcacggcgcgcataatagccagcggcggcgccgacggagccgctgccaataatgataagatcgtattgcatggtgagttccgggtaattgccttgttagcagggtaattaactccctgtgcttatacaagcccgaaaataattcaggcacccgcaggtgcctgttaagtttaatgttaagtcattcgcaagccgcgttaatgtcggcgatactcgttttcctggtattcgccagattcaatcttcgcaatgcctgcttccaggattgaaataaactgacgtgcgacgtccgtcgttagccatagcgtctggccgatctcagcatcattactgttttcttgagtggggttctggtagtgcaggcgcaacatcagcgcatcgtagctatgaacggtgctgatgtcccatccaacgaggggatgggtctgaatgacttcattatttttttccatcataaccccttattcatatgttaaaagacaacaattctcgaggtttaatgcatattttttgaagcaagttaattatatcagggatcaagaataaactcgagaaattaaatgaaaggcagcatgattttcttcttttgccgcttttttactcaagataagcgcgtaaaatggccactttagtcgatattgagcagaataatcaggactattctgaacagaagaggggataaaaaaagccggggcgacccggcaaaaaaagcacaatgagggagcaaaccagagtaactggatcccgccatgcttcaggagagatcgtggacaaaccagtcgtccgcgctttcccatgtttcctgcaggatttcgcttatccggtctttgtcttctttcagggcgccaaacaccgagagctgattaccggtggcgtagcggacgctcacctggctatcgatggccgggaattgctcggcgatacggcgagagagttcgttattcagcgcttccagcgcgccgttaggtaaggcggtcgttttggcgatagacacttcaatgcgcataattgccccctgcgttcgatactggttatttatacagtatccggttagcgttgacaacagggggctgcgtttttatttcttcacggtccagcgaacggtttcacccgccaggaagggcaccagggtgtcattaggcagggcaatgctgtccacaacggtcgtctcttcacgcaccagttcaacgtagctctcattgaccggcagaccgtagaagcgcgggccgttcagcgagcagaaagcctcaaagtgctgcagagcgttcatttcttcaaacacggtggcgtagctgccgagggcggtcggggcgttaaagcagccggcgcagccacagctggcttccttacggtggcgggcgtgcggtgcggagtcggtgccgaggaaggcgcggctgaagccgctggcgaccagctcccgcagagcctgctgatgaatattgcgtttaagtaccggcagacagtacaggtgagggcgaatgccgcccaccagcatatggttgcggttgaacatcagatgctgcggggtgatggtagcagccagcagttcattaccgtcacgcacgtactcagcggcgtctttggtggtgatatgttcaaaaaccactttcaggccgggcaggcgctggcgcaggggctccatcaccgtctcaataaagcgcgcttcacgatcgaaaatatcaatctcggcgtgagtgacttcgccgtgaacgagcaacggcatccccagtttttccatccgctccagcactggcataatggcgtcggtgctggtgacgccgtggctggagttagtggtggcattggccgggtagagcttggcggcggtgaaaaccccttcgttaaagccgcgttccagctccgctgggtcgagggagtctgtcagatagcaggtcatcagcggggtaaaatcatgcccggccggcacggcgtccataatgcgctggcggtaagcgatagccgccgcgacggtggtgacaggcggcaccagattcggcatcacgatcgcccggccataaaactcactggtataaggcacgacggttttcagcatatcgtcatcgcgcagatggatatgccagtcgtctgggcggcggattttcaatacctgggattgtgctgtcatggaaggctccggctaataggttcagtcatcagggctgttttttgccgggcactaaggataagcgtaaacgttttcctttgcactcatttccgtaaaaaattcagggcgccgtagcgccctggagattaattggtaaaggggatgacaatctcgcctggcttcacctctatacctttggcgtatttcttcgccagcgcttcgccggtgctggcgtcctcacgcaggacataagccggctgctggctgaagtagctgcgcagagactgattcaggtaggggagcagggcctgaataaccgactgcagcttctccggcgccactttggcatcgaccacttccatttcctgcaggaagatggcgcctttctctcggtcaaaggttggcagcgctttgagcttcagatcgatcgtcgctttctgcgtaccgaacagggagttaagatcgacgttggcgatcccgctcagggtgactttgcccggctcctcgcgcccgatagcgctggtcaggttctgcagttcgatatgggcgtcggcaacgcctttcagaccaatatctttggcgaaatggtttcgcttctgcagggcctggttaatctcctgctcgcttaccgtgtattgggtcagctgattacagccgctcagcaggccgctgacaattagcgcggcggcgatcaatatctttctcatggggttcctcaagctcataccttccttcatcctgacacaaagcatcatgacctgtcagcacccatcgcgccagcagaataggctgaaagcaggagaaaccgccgccgcgcgcatcaggtgcgcggctccagcataccggaggcagagcgtttcgggctgaattgccaccatagcgccaggaaggtgataaccccgatggcgccgagcatcagccacggcagttcgggctggccgacggctttcccggcatcaaacagccagccgccgcccgcgtaacccagcgcgccgccgaaggcgagccccagacggctgaaacccatatagctgccacgcgcccgggcgtccgccagcgaagcgcccagcgtctcgcgggcgggttcggcaatgatagagccgatgtaaaacaggcaaatcagggtaaacagctgctgtaaactgctggtcatcccgatggggagcatggccagggtcatcaccagcagaccggccatcagccggtgctcaaggcggaagcgtttttcgctccaacgggcaataggatagagcagggtgagcgaaatggtggcttcgatggcgtacatccatttcacggcggccggcgagccggcgatgtcattcaccatgatcggcagcatcagcatcacctgcaccgccagcatataatagccggtcagcgtcaggacataggtgacgaagcgtttgtcccgcagcacccggcccagaccctcgcgaatcggcgttttcaccgtcgagagcttccatgccggcagataccaggcgttaaacgcggcgcaggcgataaacagcgcggcgccggcgctgcacaccaggcgaaaatcatactgcagcagccagctgcccagcagcgcgccaatcaccgcgccggcgctatcctgcatcatcaggatggagaaaaagcggccgcgctgatgcggacgcaccagcttaaccaccagcgccgcccgcggcggatcgaacagtgtaccgccgagtccggagagtatgcacgagaaccacagcacccacggctcatgggcgacggccatcgccgcgaaaccgccggcacgcatcagcataccggtgacgatcatcggtttcgcgccgaagcggtcggcgatggcgccgccaaagatgcctaatccctgctgtaccagctggcgcaggccgagcgcaatgccgaccatcagcgctgcccagcccatctgatcgacaaagcggatggaaatcagcggaaaaacgacaaaaaagcccagcacgaccagcatgttatcgactaacaggaaatatttacccaggctccttgcctgcgagacgcgggacatttcccctccagggaaaaatagagataagcgaggatattctgcgggcaatctgctgcttttcccagcacccttgcgacaatatttttttatcaaaaagcaagatcgattgagcctattcatcgaaaagaggagatggcgcagaaaatggtatgttgctgttttcacactatcgtgcaggaaaggtatagtgatgaaagcaagagtgaagtcagggggactgaaaaaggaaatgtttggctatcgcagtaacgtgccgaaggtgcgtttgacgacggaccggctggtggtgcgcctggttcacgatcgtgacgcctggcgtctggccgattattacgccgaaaataaagcgttcttaaaaccctgggagccggttcgtgacgacagccactgctatccctccggatggcaggcgcgtctgtcgatgatcgctgagtttcataagcaggggtcagctttttatttcgcgctgctcgaccctgaggaaaaagagatcatcggtgtggcgaatttctccaacgtggtgcgcggatctttccatgcctgttatcttggctattccattggcgagaagtggcaggggcaggggctgatgtttgaagcgctgacgtcggcgattcgctatatgcagcgcacgcagcatattcatcgcattatggccaactacatgccgcataatcagcgcagcggcgcgctgctggcgcggttggggtttgaaaaagagggttacgccaaagattatctgctgattgacgggcagtggcgtgaccatgtactgacggcgctaacgacgccggactggtctgcgggacgttaaggagagaggatgaaatatcagttaactgcgcatgaagcgcgcgtcattggctgcctgctggaaaagcaggtcaccacccccgagcagtatccgctgtcggtaaatgctgtggtgaccgcctgcaatcagaaaaccaaccgcgagccagtgatgtcgctgagcgaaggcgaggtccaggccctgctggatacgctggtgaaacggcactatctgcgcacggtcagcggattcggtaatcgcgtcaccaagtatgaacagcgcttttgcaactccgaatttggcgatctgaagcttagcgccggcgaggtcgcggtggtcacgacgctgctgctgcgcggtgctcagacgccgggcgaattacgcagccgggcgcagcggatgtatgagttcagcgatatggcggaagtggaaagcgtgctggaagggctgacgacgcgcgaagatggccccttcgtcgcccggttgccccgggagccgggaaaacgggaaagccgctatatgcatctgttttgcgacgatatggacacgctgatcaccacagtggaagctctcgcgccgctggacgatgacggcgatctgcgcgccagggttgaagcgctggagggcgaggtggcggagctgaaagcgcgcctcgattcgctgttacaccatctgggagactaaaacgtggggacaagattgcgcattggggtggtcggcttaggcagcattgcgcagaaagcgtggctgccggtgctggggcggcggaaagctggacgctgcaggcggcctggtcgccgggtaaagagaaggcgctacggatctgcgaaacctggcggatgccatacgctgattccctcgatgccctggcggcacagtgcgatgcggtctttgtccatacctcgacggcttcacattatgaagtagtgaatcacttactgaatgccggggttcatgtttgtgtggataaaccattggcggacaagctgagtgaggcggagacgctggtcgagctggcggcgcgacgtcgactgacgttgatggtcggtttcaatcgccgcttcgcgccgctctatcgggagctgaaggggcggctgggcgaggcggcctcgctgcggatggataaacaccgtagcgatagcgtcggcaacgatctgcgctttacgctgcttgatgactatctgcatgtggtggataccgcgctatggctggccgacggtcaggcgcgtctgcgcggcggcgcgctgaagatcaccccgcagggcgaaatgctctatgccgaacatcagttcagttcgccccggctgcaggtcaccaccagcatgcatcgtcgcgcaggcagccagcgcgagtgggtgcaggcggtcacggatggcgggctatatgccgtcagcgagatgcgcgaatggcaggaggagtgcggtcatggcgtggtccagcgcccggttgccggctggcaaaccacccttgagcagcgcggctttgtcggctgcgcgcgccattttatcgaatgcgtgcaaaatcagacagttcctgaaactgcaggcgaacaggcgctgctggctcagcggatcgttgagaaactgtggcgcgacgccattagcgaataatccattgtaacaactgacagtagtaattcatgttgaacccggtagactatcgccactttccagcgcccgcatttgcgggcgttttactccagggtttggaataacagcgtaatgaaccttttaaaatcactggcggcagtcagttcgatgaccatgttttcgcgcgtgctgggctttgcccgcgatgcgattgtggcgcgtatttttggcgccgggatggcgactgatgccttttttgtcgccttcaaactgcctaacctgctgcggcgtatttttgccgaaggcgccttctcacaggcgtttgtgccgatccttgccgaatataaaagcaagcagggcgaagatgccacccgcgtgtttgtctcatacgtctccgggctgctgaccctggccctggctatcgttaccgttatcgggatgctggcggcgccgtgggtaatcaccattactgcgcccggctttgccgataccgccgataagtttgcgctaaccacccagctgctgcgtattacctttccctatattttgctgatctccctggcttcgctggtgggggcgatcctcaatacctggaaccgcttctcggtgccggcctttgcgccgacgttcctcaacgtcagtatgattggctttgcgctgtttgccgcgccatatttccatccgccggtgctggcgctggcctgggcggtgacggtcggcggcgtgctgcagctggcttaccagctgccgcatctgaagaagattggcatgctggtcctgccgcgaattaatctgaaagatgccggcgcgatgcgggtggtgaagcagatggggccggcgatccttggcgtgtcggtaagccagatctcccttatcatcaataccattttcgcctcattcctcgtgtcgggctcggtgtcgtggatgtattatgccgaccgcctgatggagtttccctccggcgtgctgggcgtggcgctcggcactatcctgctgccatcgctgtcaaaaagcttcgccagcggtaaccatgacgagtattgccggctgatggactggggactgcgtctctgttttctgctggcgctgccgagcgcggtggcgctggggatcctcgccaaaccgctgaccgtggctctgttccagtacggcaaattcagcgcctttgacgcggcgatgacccagcgcgcgctggtggcctattccgtggggctgatgggccttatcgtggtgaaagtgctggcgccgggcttctattcccgtcaggacatcaagaccccggtcaagattgctattatcaccctgattatgacccaggtaatgaacctggcgtttatcggcccgctgaagcatgcgggtctgtcgctgtccatcggcctggcggcctgcctgaacgccgcgctgctctactggcagctgcgtaaacagaaaattttcaccccgcagccaggctggttggccttcctgctgcgtctgattattgcagtgctggttatggccgcggcgctgctgggcgtcatgcatctcatgcctgagtggtcgctggggacgatgccgttccgtctgatgcgtttgctggcggtggttatcgccggggtggtagcctatttcgccacgctgctggtgctgggcttccgcgtgaaagagtttgtccgtcgcacggcgtaagcggttgtgagggtagaaaaaccccgcttcgcctcaggcgaagcggggttttttttatgatgcgctgcgttcggcagcgaggatgcgggcattctccagcaggcggatcgccagggctagcgcgccagtgatcactgccagcgtgaccactccgttccagccggccagcacgtacagcttactgcccagcaccgatcccagcgacatcccgataaacaccacggtgaacagcagggcgttgaggcggccgcgggcctgtggctcaaggccatataccaggttctgatgcgccaccaggcttgactgcaggccaaggtcaaagccaatcgccgacagggcaatcagcgccaactgagcgtgcactggcagcagcggcagcacaaacatcagggcaaaggagagggtgaccagcgccgcacccatctgtgtcaccttaccggcgccaaatttatcggccagaccgccggcaagcggcgcggccagcgccccggcggccccggcgataccgaaaccgcccgctactgcgctgcccatgtgatagtgttcggagagcatcaccgccagcgtcgaccagaaggcgctaaaggcgatagagagcgcgccctgagctagcgcggcgcggcgtaatgccgggtaacgctgccacagatgcgccatcgaggccatcagctgcggatagctcagcgtcgagtgcacagcgaagcgcggcaggacgcgccacattaccaggccaatcagcgcgacgctgaccgccgccgcctgatacatcacccgccagccgaatacggcgcccaccacgccgctgaccgtccgggagagcaggatccccagcagcagcccggtcatcaccgtgcccaccatttttccctgcttgcccgccggggcgaggatcgccgccgccgggacgatatcctgcgccatggtcgccgccataccgatcagcagactgaccaccagcagtgagctgagctggccggtgaggctgcacaggagcagcaggagcgccagcagcgcgcttttcaccaggatcagccggcggcgatcgtggcggtcgccgagcgggagcaggaacagaatgccgagcgcataacccgcctgcgtcagggtagggaccagacccataccttctacagtcaggtggagattggcgcccatcaacggcagcagcggctgcgcgtagtaaatagaggcgacgctaaagccggcgccgagtgcgagaatgaagataatccagcctgcgtcgcgggtggaaagggaagtcggtgtcatgttcaatgcctcatagatgcgatggggctatttttccctgaacgcgactggcgcggtagccgggctggtggtaaaacggttatacgtagcacgtataggcaaaaggaaaatgaaaagacaagagcgtatagaccgcattgagctgatgcgcacctatatccgcatcgtagaggccggatcgctctccgccgccgcagggcagatggacactacccaggcgaccgtcagccgccgcctgcagtcccttgaagggctgctgggggttaagctgatcctgcgcaccacccatgcgatgaagctcactgacgatggcgaacgctgttatcgtcacgcccgtcaggtggtggacgcctggctggcgctggaggatgacctgcgtattgccgacgatcggccggtgggcgttctgcgagtgcgggcgccccacgcgtttggccagcagcagctgctggcgccgctggtggcatttctacagcgccatccgcagctgtcggtggagtggatgctaaacgataataccgtcgacttcctcagcgataatatcgactgcgctattcgcgtgggggcggaggtggatccagcaacggtatccgtactgctggcggaagtgccgcgctgcgtagtggcttctcctgagctgctggcgaagtatccgccgttaacctcgctggaggcgttatcgggcctgccatggatcgccattaataccttttatcagcatgaggtacggctcaggcatcaggcaagcgggcagattgtctctacagcgattactccctgtctgagcactgacagtctttacgtcgcgcgcaacaccgcgctggcggggctgggggtggcgatggtgtccagctggacggtcgtggaggatattgccgccggacggctgattgagctgttcccgcagtggcgacccgcctcgctgccggttcatctggtttatccctgggcgcgctattacccgacacgcctgcgtaagttcctcgacctgatgcgggagatcatgccggatctcgccgggatgcagcgtccgcaaagcgcataaaaaaaccggccaaaggccggtttttttattaagcacgcttactcgacgggctgtgggcgagtcggttcagcggtggctttatgggtcgcgctatgaccaccggcggcgcctttaccttcaaaggcgaacggcgggcgcacccaggtgctgtgacgcggtgcttccgggacatagtccggagctggcgcacgggtcattggcgcggtggcatggcgatgacccgccactacgaccggcttgctcaccgggggctcggctttgaccggttcggcaggggccgcttcggtcactggcgcttgctccacggtttctgcggccggggcgatggtttccactggcgctgcaacgacaggcgtcgtttctaccgcttcaggttctaccaccaccggctcggcgtcgagcgtcactggcgcgatagcctgaggcgcttcgacagccggtgcttcggtgaccggctcctgaggcgctggctcgacggctgctggcgcgacaacttccgcagcatcaacgaccagcggctcggcggccgctaccggctcgacgactaccggctcagcggttactggttccatggtagccggctcgacggtgaccggcgcagcggtaacggtttcaacgacggcaaccggggccgctacggcctcgacagttttcgcgacgctggcgtcctgaacctgaacctcttccggctgctgatcctgcggacgaaccaccgggtagcggatccagactttaccggaagccatctccggcgatgcgcaggctacggtcagcggcataggcgactgggtcggatagcgttcgtcacgatagcgacgacgacgctgaccgctgacgcgcaggtgacgcggggagcgacgtgagcgacgcggcataccgttcgcttcacgggattcgccattttcgtcctggtccgccacgctctccacccctgccggcagctcggctttcaccggctcgctttgcggagcgataacttcagccactacggcttctggcacgatctcggcaactggctcgacgacagcggactcaacgcgcactttctgtgccagctggcgcggtttacgacgcggcagagtttgtacacgctcttcctgctccgtctcctgcacaactggctcttcgcgagtctgcgctttggcttcctgctgcgcctgacgtttgtcgtcattgcggcggcgggtgcgttcgcggcgcggctgctgctcgtcacgggatttcgctttctccgcgtcgtcgcctgaggtttggcgaacatcacgggcttccacgttctgcgacggcttctcgcgacggttgcgacggttctcttcacgcgatacgcgcggttcacggccctcggcattgtccgcacgggtgtcgcgattgtcacggttatcgcggttgtcacgattgtcgcggttatcacggcggtcgttgcggtcgcggcggttgttggcgcgcggtttacgacgctcctgctgacgctccggtttttcttccgctttcttctcgacctgaacttcagccggtttggcctcttcggcgccagagaagatattcttcagcgcgctgaagaagcgtgagagcaggccaggctgcgccggtgcggcggccgcgaccggtgccgctgcggcgacaggcgcggcggcaggctcttcgagcatcggggctggcggcgcatctggcatgacaaaagcggccagggccggctgttccggacgtttccgctccgccggctcatcgtcgcctggcagcgccatctcttcttcatgcagcttcggcagcagatagctcagcgttgaggtttcttcacctttgcgcacgcgcaggacggagtagtgcggcgtttgcatttcgtcgtttggcacgataataacgcgcacatcgccctgacgggattcgatagcgctcactgcggcacgtttttcgttcagcagataggaggcgatcggtaccggaacaatggcgtggacttctttggtattctctttcagcgcttcttcttcgatcagacgcagaatagagagcgacagcgattcgttatcacgcacggtgccggtgccggagcagcgcgggcagacgtggtggctggactcgcccagcgacgggctcaggcgctgacgggacatctccagcaggccgaagcgcgaaatatggctgatctgaatgcgcgcccggtcctgacggacggcttcgcgcagacgattctccacggcgcgctggtggcgaaccggggtcatatcgatgaagtcgataacgatcaggccgccgaggtcgcgcagacgcagctggcgggcaatttcgtcagccgcttcgaggttggtattgaaggctgtctcttcgatatcgccgccgcgggtggcgcgggcggagttgatatcgatcgcggtcagcgcttcggtgctatcgataacgatagacccgccggaaggcaggcgcacttcgcgctggaaggcggactcaatttgcgattcgatctgataatggctgaacagcgggatttcaccggtgtacagtttgattttgctgctgaaatccggacgacccagcgcggcgatatgctggcgcgccagctcaagcactttcgggttatcgatcaggatttcgccgatgtcctggcgcaggtagtcacggaaggcgcggacaatgacgttgctttcctggtggatcaggaacggcgccggacggctttccgcggctttctgaatcgcttcccagtgcttcaggcggaagctcaggtcccactgcagggcttcggcggatttgccgacgccagcggtgcgaacgatcaggcccatgccgtccggaagctccaggctcgccagcgcttctttcagttcggtacggtcgtcgccctcgatacggcgggaaattcccccggcgcgcgggttgttcggcatcagtaccagatagctgcccgccaggctgataaaggtggtgagcgcagcgcctttgttgccgcgttcttctttatcaatctgcacgataacttcctgaccttcccgcagtacgtctttgatattaggacgaccatgcgcattgtagttggcggggaagtattcgcgggcgatttctttgagggggaggaaaccatgacgctcggcgccgtaatcaacaaacgcggcttcaaggctgggttcaatgcgggtgattttgcctttgtagatgttcgcttttttctgttcgtgcccggggctttcgatatccaggtcgtacaggcgctgcccatcaacaagggcgacgcgcaactcttcctgctgagttgcgttgattaacattcttttcatcgtaacttactcattattcttacattgacgactaagctgcgggcagagtaatgcctttccgggggaaaaccgatggcctcgtgtctggttcacgtcgccaacctcacggttgtcgcgcgcttaagaggcgcagagtgtcggtcgcctgtgtttcaaacggaaacacagcgcaattattcaggggaacagcctgggatgtatcaccagagaatattccatttatactcgtcgtctttcgcgttgcaggcatggtggcttaacctgctcacctcgatctggcgatccagatgagctcccgggagtcccggagttgacgccttcctgcgacttgaaatccatagagcctgtaccggtaaggactgcaacccgcagcccgctaactgtctgaaagatcacaacgtcttacgccattgctgcgtgggcgatcggtcagacaaaattggtcattccgctaatgtcttgttctaacaagatgcaatacggaaaacggtctcattattccattgctaaccttgttatagcaagttgactttcaccttttatcacccggttactcacagttttatcacctgcccatacagattgttctaataacaaacaaaatggcggtcaggtaaaccgtgaaaacaggataatgataaatataagcatataaaaatgagtggcgctaatgcgtccggctatttagaatcgcgcaccatgaaaactgagaccccaaccgtaaaaatggttgccattgctgctgatgaagcggggcaacgtatcgacaactttttgcgtacgcaattgaaaggcgtaccgaagagcatgatttatcgcatcctgcgtaaaggcgaggtgcgggtaaacaaaaagcgcgtgaagccggagtataagctggaagcgggcgatgaagtccgtatcccgccggtacgcgtggcggagcgtgaagaagaggcggtatcgccgcacctgcagaaagtggccgcgctctctgaggtgatcctctatgaagacgatcatattctggtgctcaataagccttctggtactgcggtacacggcggcagcggcctgagcttcggcgtgattgaagggctccgcgccctgcgcccggaggcgcgcttccttgagctggtgcatcgtctcgaccgggatacctccggcgtgctgctggtggcgaaaaagcgctcagcgctgcgttcgctgcacgagcaactgcgcgataaaggcatgcagaaagattatctggcgctggtgcgcggccagtggcagtcgcataccaaagtggtccaggccccgctgttgaagaatattctgcagagcggggagcgcatcgttcgcgtgagtcaggaaggcaagccgtcggagacgcgctttaaagtggaagagcgttacgaattcgccacgctggtgcgctgcagcccggtcaccggccgcacgcatcagatccgcgttcatacccagtatgccggccatcctatcgcttttgacgaccgctatggcgaccgagagttcgacaagcagctgtccgctaccggcttaaaccgcctgttcctgcacgcggcggcgctgaagtttacccacccggggagcggggaggtgatgcgcgttgaggcgccgctggacaaccagctgaagcactgtttacaggtgctacggaagagcaaataagcgcaacggcggaatcagttccgccgtttttttgcctcagcctaacagcgggttgtagttttcacggcgcaacatctgacagagcgcgattaagggtaaaccgaccagggtgttcgggtcgcggccttccagccgttcgaacagcgtaatgcccaatccttcgctcttgaaactccctgcgcactgcagcgggttctctttgcgcacatagccttctatctctttatcactgagatggcgaaagtgaacgtcaaagggttcgcattcggtttgcagatggccgctggcagagttgtacagcgccagtccggtataaaaggtaatgattgacccgctggcctttcttaactgcctgcgggcattttcctcggtgtgcggtttgccggtgatttcaccgtccagtacgcaaacctgatcggagcctataataaggtgattagggaagcgtgtggccagactttgcgctttggcctgcgccagtcgggtgacaagctgacgtgcggattcatcaggccggggcgtttcgtctacgtcaggcgcggcacattcaaacggtaaacccagtttttccagcagcatgcaccgccagggagaggttgacgcgaggataagatcagacatattttttcatccacatatagcgcttcgcagagcatcatcttaaactatgcgccgcaatgtgtgcgaataaatggcaaaaggcaacctgaggctgcctttttctttgactctatgacattacaaagttaatatgcgcgccctatgcaaaaggtaaaattacccctgacttttgatccggtacgcacggctcaaaaacgccttgattacgaaggcatctatgcccgcgatcaggttgaacgtgtaaccgattctgtagtcagcgtggacagcgatgtggaatgcagcatgtcgttcgctatcgataaccagcgtctcgccgttattactggcgatgcaaaggtaacggtaactctcgaatgccagcgttgcgggaaaccgttctcccatcacgtccacaccacgtattgttttagccccgtcagaaatgacgaacaggccgaagcactaccggaagcgtatgagccgattgaggttaacgaattcggtgaaatcgacctgcaggcaatggtcgaggatgaaattatcctctccctgcccgtagttccggtgcatgattctgaacactgtgaagtgtccgacgcggacatggtctttggcgaactgcctgaagaggcacaaaaaccaaacccatttgccgtattagccagcttaaagcgtaagtaattgaggagtaaggtccatggccgtacaacagaataaaccaacccgttccaaacgtggcatgcgtcgttcccatgacgcgctgaccgcagtcaccagcctgtctgtagacaaaacttctggtgagaaacacctgcgtcaccacatcactgccgacggtttctaccgcggtcgcaaggttatcgctaagtaatcacgcgatactcgcaggatttcccgttgcaggccatggcgggcgtgtgcgtccctggaaactcggttaacccggtcgctgggggcatttatgcccggattgttgcgtctgcagcgtgaatattcgcgggtgccagcgtgatgaagcttagtgaggactccccgggcaactggggaatcaccgaaccgggcagcgacgataccttgacacgtctaaccctggcgttagatgtcatggggggcgatttcggcccatccgtgacggtgcctgcagcactgcaggcactgaactctaattcgcaactcacacttcttttagtcggcgatcccgacgccatcacgccattactcgccaaagctgacttcgaacaacgttcgcgtctgcagattattcctgcgcagtcagttattgccagtgatgcgcgacccgcgcaggctatccgcagcagtcgcggaagctcaatgcgcgtggcgctggagcttgtgaaagaagggcgggcgcaagcctgcgtcagcgctggcaacaccggcgcgctgatgggtctggcgaaactgctgctcaaaccgatcgaaggtattgagcggccggcgctggtgacggttttaccgcaccagcagaagggcaaaaccgtggtgctggatctcggcgccaacgtcgattgcgacagcacgatgctggtgcagttcgcggtaatgggcgcggtgctggcggaagaagtggtcggcattgccaacccccgcgtcgctttgttgaacatcggtgaagaagagatgaaaggcctcggcagcatccgcgatgctgccgcagtgctcaaaacgctgccttccctcaactacatcggctatcttgaagccaatgaactgttgaccggaaaaaccgatgtgctggtttgtgatggattcacgggcaacgtcacattaaaaaccatggaaggtgttgtcagaatgttcctttcactgctgaaatctcagggagagggcaaaaaacggtcgtggtggctgctgttactaaaacgttggttacaaaaaagcctggcgaggcgattcagtcacctcaaccccgaccagtataatggcgcctgtctgttaggattgcgcggttccgtgatcaagagtcatggtgctgccaatcaacgcgcctttagcgtcgcgatagagcaggcagtgcaggcggtgcagcggcagatccctcagcggatcgccgcgcgcctggaatctttatacccagctggtttcgagctgccggaaagcgacagtgacgtgaacgcccgacagcaaagcgggacgaatggccacgattgacgccgcggcggttgaacgaggcgggtatatcacccaagagtgactgagcgtacatgtatacgaagattattggtaccggcagctatctgcccgagcaagtgcgtacaaacgccgacctggaaaaaatggtagaaacctctgacgagtggattgtcacccgcacaggtatccgtgagcgtcgtattgccgcagcgcatgaaacagttgctacgatgggctttgaagccgcaaagcaggcgctggcgatggcgggcgtgtccgcggagcaaattggtctgattatcgttgcgaccacctccggcacgcacgcgtttccgagttctgcatgccagatccagtcaatgctgggcgttaagggttgcccggcgtttgatgtcgccgccgcctgcgccggtttcacctatgcgctaagcgtcgccgatcagtatgtgaagaacggcgcggtagattatgcgctggttgttggcgccgatgtgctggcgcgcacctgcgatccggcggatcgcggaacgattattattttcggcgacggcgccggcgcggttgtactgggcgcctccgaagagccgggcattatctcgacgcatctgcatgccgacggcagctatggcgaactgctgaccctgccgaacgccgatcgcgtcgatccggaaaacccgatctatctgacgatggccggcaacgaagtcttcaaagtggcggtcaccgagctggcgcacatcgttgatgagacgctggcagcgaataatcttgaacgttcagcgctggactggctggtgccgcatcaggctaacctgcgtattatcagcgcgacggcgaagaaactgggtatgtcgatggataacgtcgttgtgaccctcgaccgccatggcaacacctccgcggcgtcagtcccttgcgcgctggatgaggccgtccgcgatggccgtattcagcgcggtcagctgattttgctggaagcctttggtggcggtttcacctggggttccgcgctggttcgtttttagtataaggatttaaacatgacgcaattcgcatttgtgttcccggggcagggctctcaggccgtaggcatgctggccgaaatggctgccgcctggccggtcattgaagagaccttcggtgaagcttccgcagcgttgggttacgatctgtgggcgctgacgcaacagggcccggcagaagaactgaataagacctggcagactcaaccggcgctgctcgccgcctccgtggcgctgtaccgcgtctggcaacagcagggcggcaaagcgccagcgctgctggcgggtcacagcctcggcgaatactccgcgctggtatgcgcgggcgttatcggtttcgctgatgccgttcgcctggttgagctgcgtggtaaattcatgcaggaagccgtaccggaaggtaccggcgccatgtccgcgattatcggtctggacgacgccgctatcgccaaagcctgtgaagagtctgccgaagggcaggtggtctctccggtgaactacaattctccgggccaggtggttatcgccgggcacaaagaggccgttgaacgcgctggcgccgcctgtaaagccgccggcgccaaacgcgcgctgccgctgccggtgagcgtgccgtcccactgcgcgctgatgaagccagccgcagaaaaactggcggtagagctgcagaagatcaccttcaacgcgccgacgattccggtggtgaataacgtcgacgtgaagtgcgaaaccgcgccggacgccattcgcgacgcgctggtgcgccagctgtacagcccggtgcagtggaccaaaaccgttgagtttatggctgccgagggcgtatcgcatctgtatgaggttggcccgggtaaagtcctcaccggcctgaccaaacgtattgttgacaccctgaccgcttccgcgcttaacgagccggcggcgatgtctgcggcgcttgagcaataaaagaggaaaaccatgagttttgaaggaaaaatcgcgctggttaccggtgcaagccgcggtattggccgtgctatcgctgaaacgctcgtcgcccgtggcgcgaaagttatcggtactgcgaccagcgaaagcggcgcgcaggcgatcagcgactatttaggcgccaatggtaaaggtctgatgttgaatgtgaccgacccggcatctattgaatctgttctggaaaatgtgcgcgcagagtttggcgaagtggatatcctggtgaataatgccgggatcactcgcgacaatctgttaatgcgcatgaaagatgacgagtggaacgatattatcgaaaccaacctgtcatcggttttccgtctgtcaaaagcggtaatgcgcgctatgatgaaaaagcgtcatggacgtattatcactatcggttctgtggttggtaccatgggaaatgcgggtcaggccaactacgccgcggcgaaagcgggtctgatcggcttcagtaaatcactggcgcgtgaagttgcgtcccgcggtattactgtaaacgttgttgctccgggctttattgaaacggacatgacgcgtgcgctgaccgatgagcagcgtgcgggtacgctggcggcagttcctgcggggcgccttggcaccccaaatgaaatcgccagcgcggttgcatttttagcctctgacgaagcaagttacatcactggtgaaacgctgcacgtcaacggcggaatgtacatggtctgaccgagatttgtgcaaaacgttcaggaaccgcgcacttcgcacggttctctgtgcggttttgtgcgaaaagatttgcgttcttagggcaaacggcctcaaaatagcgcaaaatcgtggtaagacctgccgggatttagttgcaaatttttcaacattttatacactacgaaaaccatcgcgaaagcgagttttgataggaaatttaagagtatgagcactatcgaagaacgcgttaagaaaattatcggcgagcagctgggcgttaagcaggaagaagttaccaacaatgcttccttcgttgaagacctgggcgctgattctcttgacaccgttgagctggtaatggctctggaagaagagtttgatactgagattccggacgaagaagctgagaaaatcaccaccgttcaggctgccattgattacatcaacggccaccaggcgtaagtgaacatctccaggcggtcattcgaccgcctgagttttatctttttattgtcccacaagaatctattttccctccctggaggacaaacgtgtctaagcgtcgtgtagttgtgaccggactgggcatgttgtctcctgtcggcaataccgtagagtctacctggaaagctctccttgccggtcagagtggcatcagcctgatcgaccatttcgatactagcgcctatgcaacgaaatttgctggcttagtaaaggattttaactgtgatgacattatctcgcgcaaagaacagcgcaagatggatgccttcattcaatatggaattgtcgctggcgttcaggccatgcaggattctggccttgaagtgacggaagagaatgcaacccgtattggcgccgctatcggctccggtattggcggtctcggcttgatcgaagaaaaccacagttcgctggttaacggcggaccgcgcaagatcagcccattcttcgttccttccacaattgttaacatggtggccggacatctgaccatcatgtttggtctgcgtgggccaagcatctctatcgcgaccgcgtgtacttcaggcgtgcacaacatcggccaggccgcgcgcatcatcgcctatggcgatgccgatgcgatggtggcgggcggcgcggaaaaagccagcaccccgcttggcgtgggcggcttcggcgcggcgcgtgcgctctccacgcgcaatgacaacccgcaggcggcgagccgtccgtgggataaagatcgtgacggcttcgtgctgggagacggcgcgggtatggtggtgctggaagagtacgagcatgccaaaaaacgcggcgccaaaatctacgccgagatcgttggcttcggcatgagcagcgatgcttaccacatgacgtcaccgccggaagatggcgcgggcgccgcgctggcaatggtgaatgctattcgcgatgcgggcatcgaaccgggccagatcggctacgtcaacgcccacggcacctcgacgccggctggcgataaagcggaagcgcaggcggttaagtctgtcttcggtgatgcggcgagccgcgtactggtgagctctaccaaatccatgaccgggcatctgctgggtgcggcaggggcggtagagtcgatttactctatcctggcgctgcgcgatcaggcggttccgccgacgatcaacctcgacaacccggatgaaggctgcgacctcgacttcgttccacacgaagcgcgtcaggtttccggtatggagtacaccctgtgcaactccttcggctttggcggcactaacggttcgctgatcttcaaaaaagtgtgacagggcttgccccggtactgctttaacaaaaggcccgttcgtcgggccttttttattcagctttctccccttgttctctgctctgggtcctgacacactgaccgaccagtgaaaaggagtcctttatgttcttgataaacggcgttgtacaggacacgttggcagcgaacgatcgcgccatccagtttggcgacggctgttttaccaccgcccgcatccagcaagggcaggttgcgctactggacgcccatctgcagcgtttacagacaacctgtgaaaaattacatatcccatttaacgactggctgacgctgagcgaagagatgcagcgtctggctcggccgcacgcgcagggcgtgctcaaggtgactctcacccgcggcgttgggggaaggggatacagtacggcaggctgcgtgtcgcccactcgcattctcagcttctctccattcccggcgcattatgcgcgctggcgggaggagggcattactctgacccagagtccggtgcccctggggcgcaactcctggcttgccggcctgaagcaccttaatcgccttgagcaggtactgatccgctctcatcttgagcagacggacgccgatgaggcgctggtccttgacagtgacgggtggcttacggaatgctgtgccgcgaatttattctggcgtcagggacgtgatgtatttactccgcgactcgattatgccggggtcaacggcattatgcggcagcgctgtatcgcgcagctggcaccatcgacgtttcgcgttgtcgaagtgacagcgcgtcccgagacgttgcgggaggccgatgaagtgctgatctgcaatgcgctgatgccgctggtgccggttcgccgctgggaggagaccacctggtcctcgcgtgagctttaccattttttagcccctttgtgtgagctgtctggttagtatgaagaaaatgttacgttttatcctgttgctggtcgtgctgttgggcatcgccgcggcggcaggcatgtggaaggtacgccagctggcggacagcaagctgctgattaaggaagagaccatctttaccctcgaagccggcaccggccggctggcgctgggccaggatctctatcgcgagaaggtgatcaatcgcccgcgcgttttccagtggctgctgcgggtggaacctgagctgtctcacttcaaggccgggacctatcgcttcacgccgcaaatgacggtgcgcgagatgttgcagctgctggccagcggcaaagaggcgcagtttccgctgcgctttgtcgaaggcatgcgcgtcagcgactacctgcgccagctgcgcgatgccccgtacgtgaagcacacgcttgaagacgatagctacgcgacggtggctaaggcattaggtcttgagcatgccgactgggtagagggctggttctggccggatacctggatgtacaccgccaacaccagcgatatcgccatcctcaagcgcgcgcatcagaaaatggtcgccgaagtggcgaaggtctgggaaggacggatggagaatctgccctatgccgatcagaaccagctgttgaccatggcctcgattattgaaaaagagaccgcggtagcggaagagcgcgaccgcgtcgcgtcggtatttatcaaccgcctgcgcatcggtatgcgcttgcagaccgatccgaccgtaatctacgggatgggcgaaggatatactggtaagttaacgcgtaaggatctcgagacgccgaccgcatacaatacttataccatcagcggtttgccgccgggccctatcgcggtgccgggcgaggcctcgctgaaggcggccgcccatccggcgaaaacgccatatctttatttcgtcgccgacgggaaagggggccatacgtttaccacaaacctggtcagtcataaccgtgcggtgcaggattatctgaaagtacttaaggaaaaaaatgcgcagtaactatatcgtcatcgaggggctggagggcgccgggaagaccaccgcacgtcaactggtggtggagacgctgcagtcggcgggtattcacgatatggtgtttacccgcgagccggggggcacaatccttgccgaaaaactgcgtagcctggtgctggatatccagtccacgggcgatgaagtgattaacgataaagcggaagtgctgatgttttacgcggcgcgcgtccagttggtggagaccgtgattaagcccgcgctggcccgcggccagtgggtgatcggcgatcgtcacgatctgtcgacgcaggcctatcagggcggcggccggggaattgaccgcacgatgctggcgacgctgcgcgacgcggtactcggtgattttcgccccaatctgacgctgtatctcgacgtcacgccggaagtggggctgcagcgcgcccgggcccgcggcgagctggatcgcattgagcaggagtccatgaactttttcaaccgtacccgcgcgcgctatcttgagctggccgccgccgatccttctatccgcacggttgacgcaactcagccgctggatgccgtggcgcgcgacattcgcgccacgatcgcccagtggatggcggagcaagcggcatgaaatggtatccgtggctgcgcccctcgttcgagcaactggtcggtagctatcaggccggacgaggccaccacgccttactgttacagtccctgaacgggatgggcggcgaggcgttgatttacgcgctgtgccgcttcctgatgtgccgccagcccgaaggacataaaagctgcggccactgccatagctgtcagctgatgcaggccggcacgcaccccgattactatgcgctcagccccgagaagggcaagagcgcgctgggtattgacgcggtgcgcgatgtcaatgaaaagctctatgaacatgcgcgccttggtggggcaaaagtggtctggattagcgatgctgccttgctgaccgatgccgccgccaacgcgttgctgaaaacgctggaggagcccccggagaatacctggttcttcctcgcctgcgaggagccggcgcgtctgctgaccactctgcgcagccgctgtcgcctgcatcatctggcgccgccgtctgagccttatgctctggcctggctggagcgtgaggtgagcctgccgcaggagtcattgttgaccgcgttacgcctgtgcgccagcgcgccggctgcggcgctcgaactgttacaggaaccgctgtggacggcgcggcagcagttgtgtcaggcgctggcggctaccctggcgagcggtgactggctgacgctgctgccgatactcaatcatgaacaggcggcggttcgcctgcactggctggcgtcgctactggtcgatgcgcaaaaacgacagcaggggattaccctggtgagtaaccctgacgtctggccgctgctggagcagctggcgcacagcctgcccgccgcccggctgcaggcgattgcccatgacgtctgtacctgccgcgagcaattgctcaacgttgtcggtgtcaaccgcgaactgctgcttaccgagcgcctgctgcgctgggaacattacctgcaacccgggacgggtttacccgtctcccacctctgagtgagacattatgtttttagtcgactcccactgccatcttgatggtctggattatcaaactctacacaaaaacgtcgacgacgtgctggcaaaagcggccgcacgcgatgtgaaattttgcctcgccgtcgccacgacgttgcctggctaccgcagtatgcgcgaactggtggggacgcgtgacaacgtcgtcttctcctgtggcgtacacccattaaaccaggacgagccctgggaggtagagaccctgcgcgcgctggcagcggaagagggcgtcgtggcgatgggggagaccggtctggattatttttataccccggaaactaaagcccaacagcaaagctcgttccgcgaccacattcgtatcggccgtgagctcaataagccggtgattgtccatacccgtgacgcacgtgccgatactctggctattttgcgcgaagaaaaggtgacggattgcggtggcgtactacactgtttcactgaggacagggagacagcgggcaagctgctcgatatggggttctatatctcgttttccggtatcgtcacttttcgtaacgccgagcagctgcgtgatgcggcgcgctacgtgccgctggatcgtctgctggttgaaaccgactcgccgtacctggcgccggtcccccaccgcggcaaagagaaccagccggcgctggtccgtgacgttgccgagtatatggcggtactgaagggggtgtcgcttgagcagctggctcagcagaccaccgacaattttgccaccctgttccacatcgaccccgcccgtttgcaacctgcttgatctgcttattattttaaggctcgtaattaatagccaaagcgagtaaagttcaccgccacaaaagtggcggtgaaggttttttagcaacatctggatacaatttatgtaagttgatgtaaatttttaccggaaggctgattgaaacgtgatagccgtcaaacaatcatcccgttaattattttactctgtgtaataaataaagggcgcttagatgtcctgtccacggcacggttctcccccgggccaatgcgtgaaagcgtaaaaaagtaccaaatactcaggagcactctcaattatgtttaagaatgcatttgctaacctgcagaaggtcggtaaatcgctgatgctgccggtatccgtactgcctatcgcaggtatcctgctgggcgtcggttccgctaacttcagctggctgccagccgtggtctcccacgttatggcagaagcaggcggttcagttttcgccaatatgccgctgatcttcgctatcggtgtggccctcggcttcaccaataacgacggtgtatccgcactggctgcagtcgtggcttacggcatcatggtgaaaaccatggcggttgttgcgccgctggtgctgcatttacctgctgacgagattgcggcaaaacaccttgctgataccggcgtgcttggcggtattatctccggtgctatcgccgcctacatgttcaaccgcttctatcgcatcaagctgccagaatatctcggcttctttgcgggcaagcgttttgtgccgattatctctggtctggccgctatcttcaccggcgtgatcctctccttcatttggccgccgatcggctccgcgatccaaaccttctcccagtgggctgcttatcagaacccagtggtggcgtttggtatctacggtttcatcgaacgttgcctggtgccgtttggtctgcatcacatctggaacgttcctttccagatgcagatcggcgaatacaccaacgcggctggtcaggtgttccacggcgatatcccgcgctacatggcaggcgacccgacggcgggcaaactgtctggcggcttcctgttcaaaatgtatggtctgccggcagcggctatcgcgatttggcactctgctaaaccggaaaaccgcgccaaagtgggcggtataatgatctccgccgcgctgacctcgttcctgaccggtatcaccgagccgatcgagttctcgttcatgttcgtggcgccgatcctgtacgttatccatgccattctggcgggcctggcgttcccgatctgtatcctgctgggtatgcgtgacggtacctcgttctctcacggcctgatcgactttatcgtgctgtccggtaacagcagcaaactgtggctgttcccgattgttggtatctgctatgcgatcgtgtactacgtcattttccgtgtgctgattaaagccctggatctgaaaacaccgggtcgtgaagacaccaccgaagagagcaaagctggcgccaccagcgagatggctccggctctggtcgccgctttcggcggtaaagagaacatcaccaacctcgacgcatgtattactcgtctgcgtgttagcgtggcggatgtagcgaaagttgaccaggctggcctgaaaaaactgggcgccgctggcgtggtagtggcaggttctggcgtacaggccatcttcggtaccaagtccgataacctgaaaactgaaatggatgagtacatccgtaacagttaagacgtagtatcggggagactaaggcagccaactggctgccttttttatgcgctaaagtcggtgccccacaagcgataaccctgaaaacagtccgccatatgcttattccctcagcagctaagtctatagttgaataagaaaaagagctttcaggttgaaagagagggagaatgtcgctcatactcttagcggaacctgtgcgtccgcgtttatctgcagaagcaggccagcgcacgggataaaacttataaggaatcagtcatggcagaagaaacgattttcagcaaaatcattcgccgggagatcccgtcggatattgtctatcaggatgagcttgtgaccgcttttcgcgacatctccccgcaggcgcccacccatattctgattgtcccgaatgttctgattcctaccgtaaatgacgtcaccgctgaacatgagctggcgctgggccggatgatgaccgtcgcggcgaagatcgccagcgatgaaggtcttgccgacgatggctatcggttgatcgtcaactgcaaccgccacggcggccaggaagtgtaccatatccatatgcatctgctgggcggtcgtccgcttggcccgatgctggcgcacaaaggctaacgtcatgctcaggacccttttgggcgcgtgtctggcggcggggctactcgccgggtgtagttcacacccggaaatcccggtttctgaccagcaggcgctggtgatggagtcgagcgtgctggcggcggggatcagcgccagcgagcctgccgtcgtggcgacagagattcaggctaccgcctcctcaacgctatataacgagcgccagcagccggttaccgtgcactatcgttttttctggtatgacgcccgagggctggagatgcatccgctggacgcgccgcgcaccatcgtggtaccggcccgctcctcggtcacgttatatggcagcgccaatatcctgggggcgcataaggcccgcctttatctttatctgtaaggggtaattataatgatgaaaatgtgtcgctatgcgttaatcacagcactggcgatattcctcgcaggctgtgcggggttgcgggagcagcccgcgccggtagaagaggccaaaccgcagccgcagcagcctgcgcagccgcagcccacggtgccgaccgtaccggcggtgccctctgtcccggcgcagcctgggccgattgagcatcaggatcagcagtcgggtcagccggcgccgcgcgtgcgtcattatgactggaacggcgcggttcagccgctggtggggcagatgctgcaggcgagtggggtcaatgccggcagtattctgctggtcgacagcgtgaacaaccgcaccaacggttcgctgaatgctggagaagccaccactgcgctacgtagtgcgctggccggtaacggcaaatttaccctggtatcggcgcagcagctggcggtcgccaagcagcagctgggcctgtcgccgcaggacagcctcggcagccgcagcaaagccatgggcattgcccgcaacgtgggcgcgcagtatgtgctttactccaatgccaccggcaacgtcaacgcgcctgagctgaaaatgcagctcatgctggtgcaaaccggtgagattatctggtcaggtaaaggtgctgttcagcaacaataagctaacgcgcgacgagctcttgtcgcgcttctttccccattatcatcctgtcgcctcgctgagccagagtggcctcagcggcggcagtgtgattattagcgacggcgaccggcggcacgtgctgcgtcagccgcacgatccgtctgccgccacttaccattttcgccgtcagtatcacgcactccgccgactgcctgccaggctggcgccaaccccgctgttttactcaccctgctggatggtggtggagtattgcgcaggggaggtgaaaagcgagttaccggcctccccgcagctgtcaggcttattgtatgatttgcatcagcaaccgcggtttggctggcgggttagcctcacaccactgctggcccagtactggcagaggtgcgatccggcgcggcgcaagccgcgttggctgcgctggcatcagcggctgcgccgccagggcgagccccgtcccctgcggctggcgccgctgcacatggacgtccatgccggcaatattattcataatgagtccggcctgaggctgatcgactgggaatatgccggcgatggcgatatcgcgctggagctggccgcggtgtggatcacgcctggcgagcgccgtcggctggtagaagcgtatgcccggcgggcggccatcgacgcgcagctgctttggcggcaggttgcactctggcgcccgtgggtactgctgctgatggcgggctggtatgaaatgcgctggcggcagagcggggaccggcaatttatcacgctggcagatgaaacatggtgtcagttagacaacgaacgtaaaggataagagaggtcagtgtgggcccagtgatgttggatgtcgaagggtatgagctggatgcagaagagcgagaaattctggcgcatccgctggtgggagggttgatcctctttacccgaaattatcacgatccggcgcagctgcgcgagctggtgcgccagatccgcgacgcctcccggaaccacctggtggtggcggtcgatcaggaaggggggcgggttcagcgtttccgcgaagggtttacccgtttaccggcggcccagtctttcgccgcgctgctggggatggaagaggggggcaaactggccgccgaagccggctggctgatggccagcgaaatgatcgccatggatatcgatattagttttgcgccagtgctggacgtcggccatatcagcgccgcaatcggcgaacgttcttatcatgaagatccgcagaaagcgctgacgatggcgcgtcacttcattgacgggatgcacgccgcgggcatgaaaaccaccggcaaacacttcccgggacacggggcggtgactgccgattcgcacaaagagacgccgttcgatccgcgggcggcatcggttatccgcgaccatgatatggcggtgttcaaaagccttatcgccgagcagcgtctggacgccattatgccggcgcatgtgatttacccggagctcgatccgcgtccggccagcggctcggcgtactggctgaaaacggtgctgcgcggcgaactgggctttgacggggtgattttctccgacgatctgtcgatggaaggggcggcgatcatgggcagctatgccgaacgcggtcaggcatcgctcgacgccggttgcgatatgatcctcgtctgcaataatcgtaaaggcgcggtcagtgtgctggataacctgtcgccgatcaaagcagagcgtgttacgaaattgtatcataaaggttccttttcccgtcaggagttaagggattcagcccgttggaaaacggtgagtgcccagctggagcagcttcatgcgcgctggcaagaggcgaagtccgcgtaacgctctacggggcgttgttgtctggtgaggatgcgatgattatctatttacacggttttgactcgaacagccccggtaaccatgagaaggtgatgcagctgcagtttatcgacccggacgtgcggttgattagctacagcacgcggcatcccaagcacgatatgcagcatttgctgaaagaggtcgataaaatgctgcagctcactgccgatgaccggccgctgatctgcggcgtcggccttggcggctactgggcggagcggattggttttctgtgcgatatccgccaggcggtgttcaatccaaacctgtttccgcatgagaacatggaaggcaaaatcgaccgaccggaagagtatgctgacatcgccaccaagtgcgtgaccaacttccgcgagaagaaccgcgatcgctgcctggtggtgctttcccgccaggacgaggcgttggacagccagcgttccgccgatctcctgcaccactattatgaaattatctgggatgaagagcagacccataagtttaaaaatatctcgccgcatctgcagcggctgaaagcgtttaaaaccctcggctaactgcttttcccttgttcccaaacccgcgtcgggttcaccacgcgggttttttcatgtctacacttattggtttcgctgaaaaaatacgcgacaaaacttgatgcacatcaattttggtatgaccaatgcaccgttcatggtattctcgacagtgctgaatggtttcattaacgtaacttgttgttaaataaaggctatttcaataacttttatttaacaattggttaataattttaggggtacacatgactacgccattgaaaaaaatcgtaattgtgggtggcggcgctggcggactggaactggcaactcagctggggagaaagttagggcgccataagaaagcgaaaatcaccctggtggaccgtaaccacagccatctgtggaagccgctgctgcacgaagtggccaccggttctctggatgaaggcgttgatgcgctgagctatctggcccatgcccgcaaccacggtttccagttccagctgggctcggtggttgatatcaaccgcgaagggaaaaccatcaccctcggcgagctgcgcaatgaaaaaggcgagctgctggtggctgagcgtaaactgccgtacgacacgctggtcatggcgttgggcagtacctcgaatgactttaatacccctggtgtaaaagagaactgcattttcctcgacaacccgcaccaggcgcgtcgcttccatcaggaaatgctcaacctgttccttaaatactctgctaacctcggcgctaacggtaaagtaaatatcgccatcgtcggcggcggcgccaccggcgtggagctctccgctgagttgcacaatgcggtgaaacagctgcacagctacggctacaaagggctgaccaacgaagcgctgaacgtcacgctggtcgaggcgggcgagcgcattctgcctgcgctgccgccgcgcatttccggggcagcgcataatgagctgactaagctgggcgtacgggttctgacgcagaccatggtcaccagcgcggatgcgggcggcctgcacactaaagatggcgaatatattgaggcggatctaatggtctgggcggcggggatcaaagcgccagatttcatgaaagagatcggcggcctcgaaaccaaccgtatcaatcagttggtggtcgagccgacgctgcagactacccgcgatgcggatattttcgccatcggcgactgcgcctcctgcgcccgtccggaaggcggctttgtgcctccgcgggcccaggcggcgcaccagatggctacctgcgcgctgaacaacatcctggcgcagatgaaaggcaaaccgctgaaggcatacacctataaagaccatggctcgctggtgtcgctgtcaaattactccaccgtcggcagcctgatgggtaacctgatgcgcggttcgatgatggtggaagggcgcattgcgcgcttcgtgtacatctccctgtaccgtatgcaccagattgctctgcatggttacttcaagaccggcctgatgatgctggtcgggcgcatcaaccgcatcattcgcccgcgcctgaagctgcactaatcgctgtcgcgacccggaggcgcgctctgagggcgcctccgggcttttctgctgaaaccgcagagatcccgctcggaatcctctgaatccctttgatttgcagcgaattctcgcacttttcatccgctatctgatttgcgccctcccggctccggttgcaaaattgtatcaacagcaacaaaggaggaactcccgtgaataaatctatgttggcgggtatagggataggcgtggctgccgcgctgggcgttgcagctgtcgctggtctcaacgtgttggatcgcggcccgcagtatgcgcaagtggtctccagtacaccgattaaagaaaccgtgaaaacgccgcgtcaggaatgccgcaatgtcacggtgactcatcgtcgtccggtacaggatgaaaaccgcatcgccggttcggtgctgggcgcggtggcgggcggggtgattggccaccagtttggcggcggtcacggacgcagcgtggcgacggtcgtaggtgcgctgggcggcggctatgcaggcaaccagatccagggcgcgatgcaggacaacgatacctacaccaccacccagcagcgctgcaaaacggtgtatgacaaatccgataaaatgctcggctacgatgtgacctataagataggcgatcagcaggggaaaatccgcatggatcacgatcccggcagccagatcccgctggacaacaacggccagctggtcctgaacaacaaaatctaaaaacagatttgtgtagtgattagcccctcaatcgctcaggctgaggggctttttttatcagaaggttaaggcgtagttcagaccaaaggtgcggccacgacctttgtactcatacagcgatgaactgccgtaggttgggctgtagagcagcggcgcgcgctggccccagatagtgacatagtcttcgttaagcaggttttcgatactgaaggtcagtttccccaccggcagcgcgtaactaccgataaaatcgacggtgttatagccttccagcttgttaccggcggcatcgctgaggtcaaatacctgctgactctgcacgcgcaggctccacggatccggcgcccagcccacccaggcggtggctttagacggcgaggcgagggtgacgtcccatttttgccagcggccgtcggtctgcacctgggatttcagcacgttaaagttaccgccgacgctccagtcgctatccggaataaagtaatcgaccgccccctcaacgccgtaaatacgccgtttgtcggactgaacgtcgatggtcatgtcggtgcggttgacgacaatggtcttatccgaggtcgagtagtacgccgccagctgggtgcgcaggttatcgccggtgtagcgccagcccagctcatacgagttaactttgatcccctgcagcggcgagtcatcgacgttgacgctggagatcagcggcagatgaccattcaccgcagcgccatatttaccgatgccatagtatttaccagggtccggtagctcgacaccctgcgagaagttaaaccaggtttgttgacgctcggtcaggtgggccacgatcccggcgttaaacaggaaattgtcataatcggttttgccgcctttgatggcgtcggcggagcgcgctttgccgttggcgatatcctgctgctgggcgtagccgacaaagtcgtcgacccggttttcggtccactggtagcgtaccccgccgctgacggtaaagatatcgttcagatcgtagctggactgcaggaatggcgcgacattggaaatactgtatcccgggtagcggccggttgtgtagatcgattcgttgtgcaacccgccggaggccatcgattgtggcagatcgaagaacatctggttggcattaaaggtctcatgatcggcgtcgagaccccaggtgagatcccaccccgccagcggttgactgttgagggtcagcttggccccatactgatcggtatcctgctgcgacgaggagaagctactgacctgacctttcgtgagcgtcgggaacggatagaaggtgagggactcatcgcgatagtacacctggctcaccagattctggccgaaaaagtcggcatcggagtactggaggctgatcagatggcgttcggtgccggggatacggtcggaattgagcccgtcggtggtatacgctttgccgccgctggtgaccgcggacatgttcttcccgagccagagaccgtagtcatcatcgccctggcttttataatactgggtgaccagctgcagctggcggttatcatcgatctcaatcgtccccgtccccattacgtcgaggcggtcagagtgctggagccccgtttgggtattatcgaggatcagcgcatcgttattgccgtcgtaccagccgccgaaacgctgataggctaccgacaagcggccggatgcgtggtctgttccgccgctgacggccgccgcgacgcgctcatcatgatcgttgctgttcgcaaaaccgctcttgctgcccacctcaagatcgacctgacgatcctgctgcccctttttggtaacgatgttgataagcccgccggtactgcccccgccgtacagcgaggtcgctccggagatcacttcgatatgttcgatgttgaatggatcgatggcgtcgagctggcggctgtcggtgcgtgaggagttgagtcggacgccgtcaatcagcacgacgatcgcgcgcccgcgcatgttcatcccatagttggtccgcccctggctgctgacgtcgatgccggggatcagctgcgccagcacgtctttgaactctttcccgccctggacctgctgctcaatctcctggccctcaatgacccaggtggtttgggccatttcggccacggtgcgatgggtgcggtttgcgctaacgatgatgctgtcttcatcagactgagccgccagcgcaggcagcgtgctggccagcagcagagggtggagcacccagaggcgctttttcatatccattccttttatgagcaagttgctttgtcgttgttatgggccggcgtcggccggtattcgttacaatgcgaaacatctggaaaaactcaaaaaaggattttgcacataatgaatatcgcaatcaatatcatttgcgtttatcttgcgcgagaaaaggtaataaaaatcaatctattttgtggggataaagccaacaggagagcggatccggcggcagaataccgccggaagcagggcgcatcaggactcgaggacctgcggccagagacggagagtggtgtcggtgatttgcatcagcttgtcgaaatccgcgccttcccgggcgctaatcgacatcccctgcagaacgcagttaagaaattgcgccagctgcgcgacatcgcggcccgcgggcagttcgccctgcgcctgccgctgctgcagaaactgggttagcgcctgctcctgcatcgcatggcgggatttgatggtattggcgatatccgtcgaggaggcggccagcgcggcggaggtattgatgataaagcagccggccggcgtctctttgctggtaaagcaggtggcgaccgccgtgaagtagtcacgcaacgcgcgatcgacggattttccctcggcaaacagcacggcttcgtgcttcgcggcaaagcgggaaatgtaacgatccaacactgcgcggaataggccttctttattcacaaattccgcatacagggtgggggcttttgctcctgtcgcctcgaccagatcggcgagcgaggtcgcctcatagccgtgctgccagaagagtgtcatggctttgtccagcgccgcatccctgtcgaacaccttcggtcggccacggctttttttggcgcaactttgaacgtcagttgtcatggtgccgttgtacctatgttggtttggtgaaaggccattataaaaataaacgatcgccggggccagcgctgtcggtttaaaaataaataattcatatatgtatgaaatttaagcattttataaatagttaaacgatcgttataaaaatgcattgacgtgtgacatagatcacattattatttacctatcgatcgttaagttaatgcttgcgaccctactataaaattcatctgcacaggtataataatcatgaaaaccgttaatactctggctattgccgccgttttaagttccctttctttcgccagctttgccgctgtagaggtgcagtccacccctgcaggacagcataaagtaggcaccatctctgcttctgccgggactaacctgggctcgctggaagaccagctggcgcagaaagcggatgagatgggcgccacttcatatcgtattacttcggtaaccggtccgaatacccttcacggtaccgccgttatctacaagtaagcccgatgcgtcgctgcccggcccccttcaccggacagcgatgagtaagaccctgttgtacccctgtttgacccttgccaacaaaaaacccgccatcaggcgggttttttgttttgtgcagcgtaagactacaacgactgcggtcctgagtcagcttgacgggtgacgtcaatcggcatgcccgagcggtaattcatcgcgcgctccatcaccgtcccgtcggtctgcggcgcctgtttgaacgcagtcatggccgcattaagcgtaatgggcagggtctgcgggtcgtcatcgatatgctcagacagcggctgatggacctcaaccagacggcggccatccggctcgaccgacgccttgatcggcgtgttgataatgttcaccttcgtgcccggcgagatagtgttgtacagcgccttgatatcgttatcgcgcagacgaatgcagccggaactgacgcgcataccgatgccgaaatcggcattggtgccgtgcaggagatagactccgccataggcggcgaggcggatggcgtgatggcccatcggattgtcaggaccagcaggcactaccgccggcagctcaatccccatagccttgtagcgcgcgcgaatgttggcggtaggtgtccaggtcggattggcccgtttgtcggacacggttgtgaccatcgtcggtgtgatggtggtcccacccagctggccgatgccgattgggtagacggtcacttcattcttgcccggcgggtaatagtagaggcgcagttcggcgaggttaatcaccagcccttcgcgcggcgcatcgggcagcagcgtctgcagggggatggtcagcacgctgccggcgcgcggaacataggggtcaaccccgggattggcctgcagcagggccaggaagccgacattgtacttcttggcaatcgcttccagcgaaccgccgtcatcctgtaccacatgaaactgattctgacccaccagccggctgcccggcggggaaggggccaggtgttagcgcgcgcggggagggccagcgcggcgactaacgcgactagcgtcagccaaagcgtcacggggaaacggtttctcattaccataactccaaaatatgtaagtggttatttttatacgaaaagcagatgagattatggcgtgagtctgtgtggggaaatccaggcggattgcaaaatgtttgtaaagattgccagatatgtgggaagggagatacggcagcggggccgtatctcctgccagtcaggcgacggcgttctcttccagctggcgcataaactggcgaacccagtccatccgcgttttacgctcctccaggtcctgcatgaacttcaggcgcgtgggaccgtccaggcggaagtgctggggctgcttttgcagcaggccgatcagccacaccggattgacgttgtttttctcgttaaattcgatcacgccgcctttttcgttgctttccagcttgcggatccctaacttttgcgcctgctgacgcagacgggcgatatccagcaggttgcgggcggcatcgggcaggcggccaaaacgatcgatcagctcgactttgatctcctccagatcctgttcgtttttggcgctggcaatacgcttatagaatgacaggcgcgtattgacgtcagggatgaaatcatcaggcagcagggaaggcatgcgcagttcaacctccgtctgctgactggtgagatcttccagcgagggttcacgcccggctttcagcgcatcgactgcgttctccagcagctccatatacagggagaaaccgatggtttccatctgaccgctctgatcttccccaagcagttccccggccccgcgaatctccagatcgtgggttgccagcgcaaagccggcgccgagatcttccagcgacgcaatggcctcgaggcgcttttgcgcatcggtggtcatcgctttcggatgcggcgtcagcagccaggcataggcctggtgatgcgaacggccaacgcggccgcgcagctggtgcagctgggcgaggccaaaatggtcggcgcgttcgatgatgatggtgttggcggtgggaatgtcgatcccggtttcgatgatggtggtgcacaccagcacattgaagcgttgatgatggaagtcattcatcacccgctccagttcgcgctccctcatctgaccgtgaccgatggcgatccgcgcctccggcaccagctccgccaacttgtcggcggctttctggatgttctcaacgtcattaaacagatagtagacctggccgccgcgcagcgtttcgcgcaggatcgcctcgcgcaccaccagggcgtcatattcgcgaacgaaggtcttcaccgccaggcgtcgcgccggcggcgtggcgatgatcgacagatcgcgcatcccgctcatcgccatgttcagcgtccgcgggatcggcgtggcggtgagggtcaggatatcgacatcggcgcgcatcgctttgatgcgctctttatgccgcacgccaaaccggtgctcttcgtcgacgatcagcagcccgagatcgcgcagcttcacctcgctctgcagcagcttgtgggtgccgatcaagatatcgattttgccttccgcggcctgctcgaggatctgcgcctgctctttagcgctgcggaagcgggagagcatttcgatgcgtaccggccagttggcgaaacgatcgcggaaattgtcatagtgctgctgagccagcagggtggtcggcaccagcaccgccacctgcttgtggttctccacggcgaggaaggcggcgcgcatggccacttcggtcttgccgaagcccacatcgccgcacaccaggcggtccatagccagcggctggcacatatcgctgaggacggcgttgatcgcctgcgcctgatccggcgtggtttcaaatgggaagccgtcgcagaatagctgatactgttcgcggtcgtgtttaaaggcaaaacccgccttcgccgcgcgctgggcatagatatccagcagctcggccgccacgtcgcgtactttctcagccgctttttgtcgcgcccgggtccaggcatcgccgcccagcttgtgcaggggggcgttttcttccgccccgccggcgtagcggctgataagatgcagggacgataccggaacgtatagcttggcatcgttggcgtaggtcagcatcagatattcgccggtgatgccgccggcttccagggtagtcatgcccgcgtagcggcccacgccgtgttccaggtgaacgaccggctggccgatatgcagttcggcgaggttgcgaatcagagtgtcagggttaatggtgcgtcgcgaatcctgacgacggcgcgccacccgctcgccgagcaggtcgctctcgcaaatcagtgccaggccgcgctggctgtcgataaacccgtgctcggcggcgccaatcatcagatagcggccgttgccggtggcttcctccagacgcagcacatgttttggcgcaactttaatccgcgccagcatttcgctcagcgcttcacggcggccttcgctttccaccgagaagatcaccggaccggtaaaggactcgaggaagcggcgcagattatccagcggcgctttgttctgcgcctggacggcgaggtccggcagcgtctggtagcccagattagtatttgccgctttgtccgccagacgttcggttttcagctgcacgcgcggccattttttcagttcgctgaatagctcatcgctgcgcagccacagcagctcaggcggcaggagcgggcgcatcgggtcgacgccgcggttttcaaagcgggcgcgggcttcattctggaatcgttccgcgctggcctcgagatcgccggtgttgacgatcagcgtgctggccgggaaatagctgaataacggcggcagcggctcgctgaagaacagcggttgccagtattcgataccggcaggtagcgtccctttactgacctgctgatagatgtgttcggcatcgcgcttcacctcaaagcggtcgcgccactggctgcggaacagctcaatagcggtctggtcggtggggaactcgtgcgccggcagcaggttaatggccgccacttcctccagcgtgcgctggctgtcaacgtcgaacaggcgcaggctgtcgatttcatcgtcaaagaaatcaaggcggtagggctgatcgctacccatcgggaacaggtcgagcagcgcgccgcgggtagcatattcgccgtgctccatcacctgatcgacatggcggtagccggccccctccaactgatcgcgcagcgcatcgcgcgacaggcgctggccctttttcatcaccagcgcgtggccgtgaaggaagctgtgcggacagacgcgctgcatcagggtgctgaccgggacgatcagtacgccgcgctgcatggtgggtaactggtaaagggtggcaagacgggaggagatgatgtcctgatgcggcgagaagctgtcgtaagggagcgtttcccagtccgccagccccatcaccatgctgtcggtaaactgcctgatctcgtcgttcagacgcagcgcgttttgcatgtcaggcgccaccagcaccaccgggccgctgtggcgttcggccatctccgccaccagggtggcgcaggctgcgccggtcaactcgccaagctggcgctgatcgccggctttgaccggcaatgagtatcgatattgttcaggcatagacggtttcatgatctcttagggattcgctctgccgatatggagggcaactcgctgatattcaatagtgagattatccgcgattggtctggattcgccaacccgaattgccatcgcgtattgggtgaagaaaggtcagcgctgtcgataagcgtaaagataaataagtaagtacttatctatccgtttgtatttacttggtttttaggattattgctaataaagtcgtcatgtatcagtcgtttacgctgcctctaatcgcttatatactcgggcatcggctatcagcaaccagatggatgacatgtaccaacctgccgcactctttatcggcctacgctatatgcgcgggcgcgcagccgaccgcttcggtcgtttcgtctcctggctctcaactatcggtattacgcttggcgtaatggcgctggtgacagtcctgtcggtgatgaacggctttgaacgcgagctgcaaaacaacatcctggggctgatgccacaggccattcttagcgccaaacagggttcggtgaaccctcagcaactgccggagcgcgaagcgaaacttaatggggtaacccgcgtagcgccgatcaccaccggcgacgtggtgctgcagagcgcgcgcagcgtggcggtcggggttatgctgggcattgatccggcgcagaacgatcccctgactccatacctggtgaacgtcaaacagagcgatctgcaggcgggcaaatataacgttattctcggcgagcagttggcgggccagctgggggttaatcgcggcgataaaattcgcgtgatggttccttccgcgagtcagtttacgccgatgggccgcgtgccgagccagcgtctgttcacggtcatcggcaccttcgccgccaacagcgaagtcgatggctatcagatgctgaccaacatcgacgacgcctcccgtctgatgcgctatccgctggggaatatcaccggctggcgcctgtggctggataaaccgctgcaggtcgacaccctgagtcaacagacgctgccgccgggaactcagtggcaggactggcgcgagcgcaagggcgaactgttccaggcggtgcgcatggagaaaaatatgatgggcctgctgctgagcctgatcgtcgccgtcgcggccttcaacattattacctcgctggggatgatggtgatggagaagcagggcgaagtggcgatcctccagacccaggggctgacgccgcggcagattatggccgtctttatggtgcagggggccagcgccgggatcgtcggcgcgctgctgggagcggtgcttggcgccctgttggccagccagctgaataatttaatgccgatcatcggcgccttccttgacggcgcggcgctgccggtggcgattgagccgctgcaggtcattgttatcgccctggtggcgatggtgctggccctgttgtctacgttgtacccttcctggcgcgctgccgccacccaacccgctgaggctttacgttatgaataagatcctgctgcaatgcgacaacctgtgcaaacgctatcaggaaggcaatgtgcaaaccgatgtcctgcacaatgtcagcttcagcattggtgaaggcgagatgatggctatcgtcggcacctccggctctggcaaaagtacgctgctgcatctgctcggcggcctggatacgcccacctctggcgacgtgattttctccggtcagccgatgagcaagctatccaccgccgcgcgcgccgacctgcgtaaccgcgagctgggctttatctatcagttccaccatctgctgccggactttagcgcactggaaaacgtggcgatgccgctgctgattggcaaaaagaagccggcggatattgaacgccaggcgaaagcgatgctgcaggcggtcgggcttgaacaccgcagccatcaccgtccgtcggagctctccggcggcgagcgccagcgggtggcgattgcccgcgcgctggtgaataaaccgcggctggtgctggcggacgagccaaccggtaacctcgacgctcgcaacgccgacagcatcttccagctgctgggcgaactgaacgtcgcgcagcgcaccgcgtttctggtggtgacccacgacctgcagctggcgaagcgcatgagccgccagctggagatgcgcgatggccgtctgaccgccgacctgaccctgatgggggccgagtaatggcgtctccgttatcgttactgattgcattgcgtttcagccgcggccggcggcgcggcggcatggtgtcgctgatctcggtgatctccaccatcggcattgcgctgggggtggcggtgctgatcgtcggcctcagcgcgatgaacggctttgagcgcgagctgaataaccgcgtgctggcggtggtaccgcacggcgaaatcgaacccgtgaatcagccgtggaataactggcaggaagcgctggcgaaggtgcagaaggtgaaggggattgtcgcggcagcgccctatattaacttcaccggcctggtggagagcggcagcaatatgcgcgccatccaggtgaaaggcgtcgacccgcagcaggagagccagctcagcgcgctgcctacctttgtgcagaataacgcgtgggccggattcaaggctggcgaacagcaagtgatcctgggcaaaggggtcgccgatgccctgcacgtgaagcagggggactgggtgtcgatcatgatccctaatgccgacgccgaccatcagctgctgcagccaaaacgcgtcaggctgcatgtaaccggaattttacagctgagtggccagctcgatcatagttttgccatgatcccgatgcaggatgcgcagcagtatctggagatgggcagcagcgtgaccggcatcgccatcaaggtcaccgacgttttccatgctaacaagctggtacgcgacgccggcgaggtgaccaacagctacgtctacatcaagagctggatcggcacctatggctatatgtatcgcgacatccagatgatccgcgccattatgtacctggcgatggtgctggtgatcggcgtggcctgctttaacatcgtctcgacgctggtgatggcggtcaaagacaaaagcggcgatattgcggtgctgcgcacgcttggcgcaaaagacggcttaattcgcgcgattttcgtgtggtatggtttattagccggatcggtaggcagcctgtttggggtggtgatcggcgtgatctgcgcgttgaacctgacgtcgatcatcaacggcatcgaatacctgattgggcataaattcctctccggcgacatctattttattgacttcctgccgtcagaattgcactggctggacgtcttttatgtgctggtgacagcactgttgctgagtttgctggccagctggtatcccgcccgccgcgccagccgcatcgacccggcgagggtgctgagtggccagtaatttatcgtcatcgtcggcctggctgacgacacaagaggaattgctgaaatgtattatggatttgacattggcggcagcaagatagcgctgggcgtatttaatcaggagcggcgactgcagtgggaaaaacgcgtcgctacgccgaaaagtagttatgaggattttctccaggcggtagaggcgctggtccgcgaggccgatgagcgcttcgaccagcagggttcggtcgggatcggtattccgggaatgccggaaacggcggacggcacgctgtatgccgctaacgtgccagccgccagcggccggccgctgcgcgctgacctcagcgcgcggttggggcgcgatgtgcgtctcgataatgacgccaactgtttcgcgctgtcggaagcgtgggacgatgagtttacgcaatacccgctggtgatgggattgatcctcggcaccggcgtgggcggcggcctggtgttgaacggtaaatcgattaccggacatagctatatcaccggcgagttcggtcatattcgcctgccggtggatgccctggaggtggttgggcgcgattttccgctgctgcgctgcggctgcggccagctgggctgtattgaaaattatctctccggtcgcggtttcgcctggctgtacgaacatttttatcagcaaccgctctcctcgccggagattgtggcgcagtggcagcagcacgatccgcgcgcgcaggcgcacgttgagcgctatctcgatctgctggcggtgtgtctggggaatatactgaccattgtcgacccggatttgctggtgctcggcggtggattatctaactttacggccattagcgaagggctggcgcaacgattgccgcgccatcttctgccggtcgccagggttccgcgcattgagcgcgcgcgccacggcgatgccgggggaatgcgcggtgcggccttccttcacctgacccattaatcacagaggtagctatgcagtcgcgccgtttacatcgattgagccgttttcgtcgcaataaacgtcggttgcgtgaccgtctgcgtcagcggattttctttagggaggacaggatgaagcctgaagcgatggcaaaaccgagagtggtggtgttaaccggcgcgggcatctcggcagagtcggggatcaaaaccttccgcgcggccgatggcctgtgggaagagcatcgggtggaagatgtggcgacgccggaaggcttcgcccgcgatccggcgctggtgcaggcgttctacaacgcccgtcgtcgtcagctgcagagtccggaaatcaagccgaacgcggcgcatctggcgctggcgcgtctggaggatctgctgggcgaccattttctgctggtcacccagaatattgataatctgcacgagcgcgccggcaaccgccgggtgatccatatgcacggcgagctgctaaaggtgcgctgttcgtggagcggccaggtgctggagtggaccggcgacgtcaccgccgaggacaagtgccactgctgccagttcccggcggcgctgcgtccgcacgtggtctggtttggcgaaatgccgctggggatggatgagatctacagcgcgctggccgacgcagatatttttatcgccatcggcacctccggccatgtctatccggcggctggctttgtgcacgaggcgcgactgcacggcgcccataccgttgaactgaacctggagcccagccaggtgggcagcgagtttgccgagaagcactacgggctggcaagcgaagtggtgcctgcctttatcgataagctgctgcaggaaaacgcgctgtaaactgaagccgcctgccggtagctagggcgcagcccacggccgccggcagcgctgctgacaaggatgtcacgtcatgacaggagtcagaccatgcataatccgctggttatcgaagcgatcatgttgatcgcggccattatcgttggcgtctggagccagcgcgctttaccgctacacgccgatagccgaccgatcctcttcctgctatgtctgttcctcggcactggcagcgcgttgtgcctgctgctggatatcttagctctgctgttgaccggtcaggtcgcgacgggcggtgtgcgaatatacggcccgttgctgctgctggtggtgctgtggaaacctctcaactgggttgtcggcatcattgaagattttgtgcagcggcgagccgaaaaagggaagggcaaaggccagcacgacggcggtcaacgctgatccgccgcctgcgccgcggcttatttatagcgccttttgcatattaatgaccgaacgggcgttcgaggcgctggtagccagcacatcgataaccccggtgcgtaatgccccaggatcgccgtcgctttcgtactttcggaggcgatagcgatgacgcagggaatggcccgcagctgttcgagacttaagccaatgacccggtcattcatcaccgtatcgacgggtttgccctgaatattgaaaaagctgtaccccgccagatcgcccaccaccccctgttcctgacgcgcggtggcaatttcctgcggcgtaaaccagccgagctgcaccataaagctgttttcattcatatcgccgaggccgatgatcgccacgtcagctttgctggcctgttcgagcgtggccttaatcaggcggttttgcataaaggccgcgcgcagctccggggtttccacatatgccggggcataaagcgtttcactgaagccgttaaatttgcgcgccagattccggctgatgtggtcggcgtcaatcagctgattgtcacgcttggttccgccgatgccgcagataaagcggcagtggcgctcaggaaacacgccaacgtgattcgccaccgcggccacattgcgcccctgaccaacggtgacggtcatatcgttttttaacaccccggcaaggtagttactgaccagggccgccacctgctggcgctgttcatcttcatcatggtgatccagggcaattagcgcgcgcttaatgccaaagtgcgaaataaactgctgctcaatctgggagctgaagaccggatggtatttgacgctgatctcaacaatcccttcctggcgcgcttttttcagcaggcgcccgactttgatacgcgaaatgccgaatcgtttggcgatctcttcctgcgtttgttcctgatcgtaataagccaccgcaatttcagtgagcagggcgtaatctgagtcttgttcaatcatggcctggaatttccatctctggtgtcccttttatattactgcgcctgcaaaataaattcctgtgtaacgcgttgaacaatgtcgcaatagccttgcgcgtcccaggccgcgcggccgataaacaagccattgatctcctgctggcgcagcaattccaccgcgttttgcagcgttacgctgccgccatagagcagcgggatacgggttcccgtctcgtgaccaaaccgctcgcaaagcgcctgacgtagcgcctgatgaatgacgcccgcctcctgcggtgaggcgggcgtaccatgttcgccaatggcccacaccggttcatacgcaatcagggtccgcagcgcctgctggtggctcaggccatacagggcgatcttcatctgccgcaccacgctttcacgcgacacctgccagcgtttctcctcggcgctatcgccaatacagatcagcgggcgcaggccatgacctaaggcgctatgcacttttcgattaatcgcggcatcgctttcattaaaggcggcacgtcgttctgaatgtcccagctcaacaagcgtggcgccggtttctgccaacatggccgccgagatttccccggtccaggcgccctgatccgcttcatgcatattctgcgcgccggtcagaagcggtaactgatgcgtttgcagaaaatggctgacgggttggatcgcggtgaaggggggaatgacgaagggctgaatagcggggtgacagccctccggcatccgcgctgccagcgtttcgcaccaggccatggcctgggacagcggcttgttcattttccagctggttcctaaccatatcggggtcatcattgcttctcctcttaataaaatcaaatacttgccaggaacggggccataccctgtattgaggttgaactttttatcactgcatgaacatatgttagatcacatttttcgatgaaaaaaatctatgaatttttttatgtgatcttcatcactcatggcggctcattcatcaggtaatgttttgagcatatgatttgatagtgaacatatgaacagtcaactgaaaaaatgagaggcgcatgatgtcagcagagaaaaaacccgttgtggcgattaccattggcgatccggcagggatcggcccggagatcaccgtggccaccatgatggacaaaagcgtgtatgacgagtgcaaaccgttcctgatcggctcggtaccgattatcagccgggcgatgaaaatcatgggctgcgattttgctatccataaaattgcccatccgcaggaggcccgttttagctgggggacgttggatgttctggaaactggcgactacgattgcgacagtatcgaatggggcaaggtgcagaaactggcggggcaaatgtcgctggactatgtgatgaagtcgatcgagctgggcaaagcggggctgatcgacgtggtctctactgcaccaattcataaggaagccatcaagctggcaggatgtaagctcccgggccataccgaaatctatcaggtggaaacccaatctgattacggtctgaccatgttccacgtccacaacctgcgcgtcttcttcgtgagccgtcatatggcgctaaaagcagcctgtgactatgccaacaaagcgcgagtgctggcctgcgttcagcagatccaccatgaatttaccgccctgaacatcaaaaatccgcgcattgccgtggccgccctgaacccgcatggttccgacaatggtctgtttggtcacgaagaggctgacaatctgatcccggcggtgaaagcggcccaggagatggggatcaacgctatcgggccggttccggccgattccgtgttccatctcggcaaacaggggcgctacgacgccattctctcgctgtatcacgatcaggggcatattgcctgcaaaaccctcgactttgaacgttcgatcaccattaccttcggcctgccgtttatgcgcagctccgtcgaccatgggacggcgtttgatatcgccggtaccggtaaggcgggtaccgtcagtatgctggagtcgacgctggtggcggcccgttactggaaaatgaagcatcaataatcgctgaggttcatgcgaatcacgaggacagagaaatggaaaaacatctgttgattagcaagggctgtaagggctggggcgggccgctgactatcacgccaggtcaggggaaaaagattgcgtacatcaccggggggatccgtcccccggtcgtcgaccgcctgagcgaactgaccggctggccttccattgatgtattcaagaatggcgaaccgccggcggaagagattggtttaatggtcatcgactgcggcggcacgttgcgctgcggactctatccgaagcggggaattcccaccattaacctgcatcccaccggtaaaagcggcccgctggcggaatttatacacgaagggatctacgtctccggcgtgacgccagcctgcattgagatggtctggccgcaaggggaaggcggaaagcttgggatcgtggctgacgatctgaccggggcaactaccgtcggggtgctgctggcacgcagtggtttaaaaaccgccgcgtttttcgataccgaatccttcgcccgcaatgaggtagagtatccggcgatggtggtcagcagcgacagccgcccattgccgaaagcggaggcccagcacaaagtgagcgctgcggtgaaacagctgcaggctcgcggcgcgcattacttcaccaagcggattgataccacgctgcgcggcggcatcggatttgaaatcgacgccatgctggaacaactgccgcaggagacggtggcggttgtggtgccggcgatgccgcagtcacggcgtattctcgtcggcggttactcggtgattgattcggtagccctgtcgcggaccgatgtggctcgcgatgtacgtaccccggtcaccgagtcgtgggtgccgggactgttggcggcgcagacccatcatcaggtcgggcatatcgcgctgacatcggtgatgaaaggcgaagggcaaatccagcaggatttacaggaacaacaacagcgcggcgtgcgggtgatagtggtcgatgcgataaccgtcgacgatgtcgatgccatcgccggggcggtagtggccctgaactggaacgtgctggccgtcgatccggggccctttaccgaacggctggcggttcgtcgcggcctgatgcgcgaagcgcggagcagcgcgcccgcgagcctgacagcggacggccagcgcggctcgattttgatcgttgccggcagcgcaacgccagtaaccaaaaaacagctccagtatttgatcgctaatgatgcccgggtctgccatatcccggtggatgccgagctgttggttgaccggaaaaacgccgctgagattgaagtcaatcgcgtggtgcagcatgcccgacagtgtgttccggcgcagcacaacgcgctctttgtttttgagtccgccttgaccgggcggttgctaaaccttcaggaagaggagcagcgatttggtctggcccacggtgaggctgcgcaaaatattaaccacggattgggcagtattgtgcgcgaggtgcttaactgtgcgtcgggtgaaattaaaggattgtatatgaccggtggtgacaccatggtcaatgtactaaaagagctgggcgccaccggaatagaaatgattgactatgtcatcccgcaaaccgatatggtgcggatcattggcggcgattatgccggcttaatttgcgtcgggaaaggagggctaaccggaccggaagatattattagcatcattgttgaccgaatttatcaggaagcacagcaataacccagtaatctaataactaataaacgacgtaatggtcgtcagggtagtattgcgtcgttatctctgttaaatcttaatttaagagttaccctatgaatattaatatacttgaaaaaatgaataaggtgcccggtgggttaattattattccactgctggtggctatattaattaatactttcgcgccccaggtgctcagcattggcgggccgaccaccgccttatttaaagtcggttccagcgccatgatgggcatatttttgctcatttgcggaacctcgatcaatatccgtcaggccgggttgccgctctataaaggcgccgtgctgctgtttctcaaatgtctggccggggcactggcggtatgggttgcgggaacgttgtttggcccgagcggttttctcggaatatcgaccctggcgctgattgcctgcctgaccagctcgaacagctccctctatatcgcattgtgcagcaactatggcgatgccagtgatgccggggcgatctccgtattctgcatcaaggatggtccgtttgttaccatgatggtgctgggcgtcagcggcctggccaatattcccttcgccgcgctgctgtcgatgctgatcccactgctgattggcatgctgtggggcaatctggacgaacgctttaaacagttatgcgctgcggcgcagccgctggtgatcattattatgtcgttcgccatcggcgccaactccagtatcaatacggtgttcaccgccgggctgtccgggatcctgttggggattatctccgcgctaaccgggattgtgttctactttatctacaacctgtttttgaagaagaaaagcgcgctgggcgccgcgctgggaaccaccgccgccagctcggcgctgacgccggcgatggttgcccaggcggatccttcgctggcgatgtacgtggatgccgccaccgcgcagctggcgacggcgagcattatcaccatgatcaccgcgccgatactggtcgcctggtttgataaacggctgaaaaagcgtgcgccagccgctgaaccgctgaaagaggtgaaaagtgaagagagcgtgacattatcttcccctgccgccaaaggacacaaatagtatgagcgtgccgttgtattcattacggattaccgccgtcggggaatatgttgagtactctctgcaggagctgcggcttattttattctccgatgccgttcccgacgatattgcgagttattgcgctgtacaccaggccagcgaactgaccgccgagttatcgcctggtcagcaaatgaaattaaatgataaaaattatcgggtgaccgcggtaggccgtgtggcaacggcaaatttacgacagcttggccatatcacgctaaattttgatggcgcagatatcgctgaattacccgggacggtacacctttacggcgaaccaccacaaattattcagcctggcgaccaaatttcgttttacccgaattgtcattaagacgtactgttaaattaaggaaataaccatgaaaacaatcgctattggtgcggatgatgccgcctatgcttttcgcgattccatcgtcgcttatttgaatgggttgggaattaacgtcgcggattacagcagcgataaacgccaggggagtaccgtttatccggatgttgcccatgcggtggcgatgtcgattaaacagggcgaacacgagcgtgggatcctgatctgcggtaccggcattgggatgagtattgtggccaataaagtccccggggtccgcgccgcacagtgtcacgataccttctccgccgagcgagcgcgtaaaagtaacaacgcgcagattattacccttggcgcgcgggtgattggcgctgagctgggcaaaaaaattattcaggcgtggcttgagtccgaatatgaaggcggcggatccgcgcccaaagtggaacgtattgattattacgaacaccagcatgccagagattaatctccgcagtcgtaagataaggaacagatgatgagccagttagacgaactaaaaaaatacaccacggttgttgctgataccggcgatattgaatcgattaaaaagtttgcaccccaggatgcgaccaccaacccctcgctggtgctgaaggccgcgcagctgccgcagtatcagccgctgattgccgatgcgattggcaaggcacgccgccagggaggcagcgcagaaacgcaattgattaacgcctgcgatcaggtggcagtggatatcggcagcgaggtgctgcgccatgtgcccgggcgtatctccaccgaagtggatgcccgctttgcctgggatcgcgggatgtgcgtcgcgaaggcgcgcaagctcatccagttatatgagaaaaatggcattggtcccgagcggattttaattaagctcgccgccacctgggagggcattcgcgctgccgaagagctggagcagagcggtataaactgcaacctgacgctgctgttctctttcgctcaggcccgggcgtgcgccgaagcgggcgtctttctcatctcgccctttgtgggccgcatctacgactggtatcagaagcaccagccgcagtcagcctatcaggtggacagcgatccgggcgtggtctctgtgcgccagatttatcagtattacaaatcccatggctatgacacggtggtaatgggtgccagcttccgtcgaattgagcagatccaggcgctggcgggctgcgatcgcctgaccatctctccggcactgctggacgagctggcggccagcgaaggagtgctgacccgccagttgactcccggctgcgtgacggaaacccgtcccagcccgatgacgcaggcggagttcctctggcagcatcatcaggatcccatggcagtggaaaaactagcggaagggatccgactgtttgctgtcgatcaggtgaaactggaacaacagattcagcagatgttgtaatccgcggggataaagactgatgaaaacgacaaataccactcgccgccaatgcgccaacgcgctgcgcgccctgagcatggacgctgtacagaaagccaaatccggccacccgggggccccgatgggtatggctgacattgccgaagtgctgtggcgtgatttcctgaaccataacccgaacaatccggcctgggctgcccgtgaccgttttgtgttgtcaaatggccatggttcgatgctgatttacagcctgctgcacctcactggctacgatctgccgatatccgagctgaaaaacttccgccagctgcactccaaaaccccgggtcacccggaagtcggctacaccgcaggcgtggaaaccaccaccggtccgctgggccagggtatcgctaacgcggtcgggatggctatcgccgagaaaaccctggcggcgcagttcaaccgtccgggacacgatatcgtcgaccactacacctacgccttcatgggcgacggctgcatgatggaaggcatttctcacgaagtgtgctccctggccggtaccctgaaactgggtaaactggtggcgttctatgatgacaacggcatctccatcgacggccacgttgaaggctggttcaccgacgacaccgccaaacgctttgaagcctacggctggcacgtggtgcgcggcgtggacggtcacgacgctgacgccatcaaacgcgcggtagaagaagcgcgggcggtcaccgacaaaccgtccctgctgatgtgtaaaaccatcatcggtttcggttcgccgaacaaagccggtacccacgactcccacggcgcgccgctgggcgacgccgaaatcgccctgacccgcggagcgctgggctggaaacacgcgccgtttgacatcccgtctgacatctatgcccagtgggatgccaaagaagccggccaggcgaaagaagcggtgtggaatgagaagttcgctgcctacgccaaagccttcccgcaggaagcagccgaattcacccgccgtatgaaaggcgaaatgccgtctgacttcgacgcgaaagctaacgagttcatcgcgaagctgcaggccaacccggcgaaaatcgccagccgtaaagcctcgcagaacgccatcgaagctttcggcccgctgctgccggaattcctcggcggctccgcagatctcgcgccgtccaacctgaccctgtggtccggctctaagccgatcaacgaagacgctgccgggaactacatccactacggcgtgcgcgagttcggtatgaccgctatcgccaacggtatcgcgctgcacggcggcttcctgccgtacacctccaccttcctgatgttcgtggaatacgcgcgtaacgcggtacgtatggccgcgctgatgaaacagcgtcaggtgatggtctacacccacgactcgatcggtctgggcgaagacggcccgactcaccagccggtagagcaggtggcttccctgcgcgtgaccccgaacatgtccacctggcgtccgtgtgaccaggttgaatccgcgattgcgtggaaatatggcgtggagcgtcaggacggcccaaccgcgctgatcctctcccgtcagaacctggcgcagcaggagcgtaccgcagagcagctggcgaacgtggcccgcggcggttatgtgctgaaagagtgcgccggccagccggagctgatcttcatcgccaccggttcagaagtggagctggcggttgccgcatgggacaaactgactgccgaaggcgtgaaggcgcgcgtggtttccatgccgtccaccgacgcgttcgacaagcaggatgcggcttatcgcgaatccgtactgccgaaggccgtgaccgcgcgcgttgccgtggaagcgggtatcgctgactactggttcaaatacgttggcctgaacggcgctatcgttggcatgaccaccttcggtgagtctgcgccggctgagcagctgttcgaggagtacggcttcaccgtcgataacgtggttgctaaagcgaaagcgctgctgtaaatccccaccgctatcgcccggcccgaagtcgggcgatacgctctctgagtaatgatcttccgatcatgagtttgtcttttcctttctgaaccatttcccactctattttgtgcgtgaccgctgatttctgtacgtttttttgtgcagaccggcaaatgtagaccagattcaataggcgcccgcacgatcgcgccgcgcccctcgattccgccggacgtctgtaaaggagaccccgccatgccgtcaccgatgatttatcaggatctcaccactgccgcgctgctcggccatgcagcgcagtatcacagcgagaccgagattgtctcggtgagtactggcggtgagaaggagcgcagctgctggggggaggtggccagccgtgctcagcggctggcatcggcgctggcgtcgctggggctgccgccgggcgcccgctgcgccacgctggcatggaacaaccgccgccatctggagatctattttgccgtcgcctccggcggctgggtgacgcacaccgtcaatccgcggctgtcggttgaccatctgcggtatatcctcaacgacgctgccgatgaagtgctgttttttgaccagacctttttgccgctggtagcgcagctgctgccgcagctgccgacggtgaaacacgtcgtgctgatggagtcccgcagcgaagcggcgctcagccagctgccctcattgctgttttatgacgatctgttgcagcaggggatggcagactatcgctggccgcagctcaatgaactgactccggcttcgctctgctacacctcgggaaccaccggccggccgaaaggggtgttgaatacccatcgttcgctggtcctgcacgccctgagcggcaaccagccggacgccgccggcatatcggcgaaggacagcctgttgccggtggtgccgatgttccatgtcaacgcgtgggggacgccgtttatcgccgccatggtcggcgcgcggctggtgctgccggggccgcacctcgatggcgacagcctgctgcagctgctggccgccgagaaggtgacggtggggtttggcgtgccggtgatctgggccggcttgctggcggcgatgcgccggacagaggtccggctgcctgaatttaaacgtgcgctggtcggcggctccgcgctgccgccgtcgatggccgaggcctttcagcgtgattacggcattgcgctgacccacgcctggggaatgaccgaaacatcgcccatcggcaccatcaacacaccgttgagcaaacatgacgcgctcccggcacaggagcagcaaaagcagcgcgccggtcaggggcggcccattttcggcatcgaactgcaggtggtggacgtggatggcgaaccgttgccccgggatggtcaaagccagggttatctgcaggtcagagggcactgggtggtagagcaatactatggtcaggacgcgagcgccctgaccgcggcaggctggtttgataccggtgatatcggtacgctcgacgccaatggttatctggtgatcagcgatcgggcaaaggatattatcaagtccggtggcgagtggatctccaccgttgagctggagaatatcgccatcgcgcatccgggggtgcgcagcgcggcggccatcgccgcccgccatccgcgctgggacgagcggccggtgctgctgtgcgtccgtgcggaagggggcgaagtggaggagaccgatctgctgagctggtttgagaagcgggtgcctaaatggcagatcccggaccgggtgatatttgtcgatgcgctgccggtcagcgccacgggtaaggtgctcaaaaatcagctgcgccaggcctacggagagattttaatgagtgagggaaaatgagccatgcgcgacccggtctgacgacctgttctcagtatgatgcggccctgcacgccttgtcggcggcgcgccagcgctgggcggaaacctcagtgaaccgtcgtctggcgctcctgcgccagatcaaggatgccctggccggcattgccccggcgtgggtggccgcggcagcggcggccaaagggctgccggcgggcgatccgctggcgggggaagagtggctggcgggcccctgcgcgctaatggtcggctgcaacgggcttatcgccaccctggagcaactggaggagaagacctttctgcggcggatcccactgcggacgctggcggacggccgcctggcgctgcgggtggtgcccggcacgctctgggatcggctgcttctgtctggtgttcgcgctgagatatggatgcagccaggcgtcacccgggcccatctcgaccgctatgcggcgcgggcatacgacatcccgcctgccgcgcggcagggcaagctggcgctggtgcttggcgccggcaatgtggcctcgattgcgccactggatgtgctacacaagctgtttattgagaatcaggtctgcctgctgaagctcaatccggtgaatgattatctgcacgatctgctggcccaggccctggcgccgctgattgccatggatgcgctccgcatcgtcaccggcgacgcccgggcgggagcgtggctgaccacccatcccgctgtcgatgagatccatatcaccggctcccgcgagacccatgacgtcatcgtctggggcgagggtgaggcggctcgccagcgtcgggccgccgggacgccgctgaacccgcgtcgggtgacctcggagctgggcggcgtcagccccaccattatcgtacccgggccgtggagcgaggcggacatcgcttttcaggcgcagcagctggcgacgcagaagatgaacaacggcgggtttaactgcgtggccagccaggtgctgatcctgcagcaaggctgggagcctgcgacggccttgctgaatcagctgtaccgactgatcgccgcgaatacccgcccggactactaccccggcgctgaaaaccggctgacagactttcgcctgcgcgcccgtcagccgctggagatagcccgcggtgacgcgctgccgttgattgtggcgaataccgacgatgatcccgggttctgccagcaggaggtctttggcccggggctgtcggtcacccgtcttgaggccgatagtgcggaaagctttctgcgccaggcgatcggctatgcgaatcagcggctgcagggcacgctaggggccaatattgtgatccacccgcgcacccgcaaagcgattggacgtaagcgttttaatgcgctgatcgccgagctgcgctacggcacggtggcgatcaactgctggagcggggtggccttcctgttagccccttgcccgtggggggcgtttcccggccacacgctcgacgatattcagagcgggcggggcaaggtgcataacagctttatgctggagaaaaccgagcgcacggtgattgaggcgccgtttcggccgtttccgcgtagtctttggcatggcgaactgacgctgatgcccctgccgccctggttcatcacccaccgggggcaggaagcggtggcgcagcggctggtggatttttaccatcggccgcgctggcgcaaattgccggcgctcctctggcgcgcgctgcggggctaaggtgagagcaaaaaaaagggcggaaccgcggttccgccctgcgggattaacggcccgctttcagcttctggtaatactcttcataaatggcgctggcgctgccgacgtcattctgccattcgcctttctcaatggttgcggcgtccggatagagcgatttatcgttggccactgccgggctgagcatcttgcgcgccgcaaggttcggcgtcggataaccgatggtttcagcgacctgtttggcgacatccgggcgcagcaggaagttaatcagcttcagcgcgccgtcgacgtttttggcgttcgccgggatcgacaggctgtccatccagaagatgccgccctctttcggccagatcacttccagcggggtaccggcctggcgggcgacgtaagccgagccgttccataccatcccgaggttcacttcgccttccatatacgggttcgccgggttatcagagttaaacgctgcgacgttgggcatcagctttttcagctcgttataggcggcttcaatctctttcgggtcggtggtgttgccggaatagcccagcttacgcagcgccatctggaacacttcgcgcgcgtcgtcggtcagcagcaggctgcttttgtattccggcttccacaggtcggcccagctggtgatagttttcgggtcaatcgcctcgctgttgacgccgatggccgtcgccccccagatataggggatggagtagtcgttattcggatcgaacggtttattcagcatctgcggatcgaggttgctgaagttagtcagcttgctcttatcgatcttctgcagcatgccttctttgcgcatcttgtcgacaaagtaggtcgacgggacgaccaggtcgtacgcgccgtctttataggttttgagcttggcgtacatggtttcgttcgactcgtaggtcgaatagataaccttgatgccggtctctttggtgaactgctccagcaggcccggcggcacatactcggtccagttatagaaatagagcgttttgctatcgtccgcgtgcgcagcgcccatgccgattgccagagcgctcgccgcgagcaggtggcgtgaccattttttcattttaacgtcccctgagttttatcacgtgcaattaactgactggcgatgaccatcaccagcgacagaaccaacaaaatcgtggccagagcgttcacctctggcgaaacgccaaccttgaccatcgaatagatcttcagtggcaggatttcataccccggaccggtcacgaacgaggagactaccacgtcatccatcgacagggtgaagctcagcaaccacccagcggctaccgccggcagggccagcggcaggataattttgcgcaggatggtcatctcgctggcgcccagatctttcgccgcctccagcatccgcacgtcaaagcctttcaggcgggagtaaacggtgaccaccacaaacggcaggcagaaggtgatatgcgaaaacagcagcgaccagaaaccaagctggacgccgatcagcataaacagcaccagcagagagatggccatcacaatatctggcgacatcatcaccacaaacagcatgccgctgacaaacggtttgccgcgaaagcggtaacggtacagcgccacggcggtcagcgagccgataagggtggcgaaggtcgccgacagcaccgccatggtcagcgagtgctgggcggcctgcagcaggctatcgttgttcatcagcaggctataccagtcggtggtgaacccctgccagttgatgccgaagcgcgaccggttaaacgagttaacgatcagaataataatagggatgtagagatacgtgtagatggcggtcataaagccgccgcgcagcagtcgaccgatcattccagctccacctttttattcagcaggcgcgccgcgcgccagtaaatcaacagcatcaggcccatcaccagggttaaggtaatgctggttgccgcgccgaacggccagtcacggatattgaggaactggcttttgatcacgttgccgatcagcaggttcttggcgccgcccatcaggtcggaaacgtagaacaaccccatcgccggcagcatcaccagcagacagccggcgatgatccccggcatggtcagcgggatgataatgcggataaaggtctgcagcttgctggcgccgagatctttcgccgcttccagcagcgggcgatccagtttctcaatgctggagtagagcggcatcaccataaacggcagcaggatgtacaccaggccgatgatcaccgccgagggggtgaacataatgcgtatcggggtgtcgatcacccccagccacagcagaaactcgttcaggtaacctttagtgctgaggaaaatcttcagcccgtagatgcggatcaacgagttggtccaaaaagggacgatcagcaggaacagcagcaggggccgtaccttctgcggcagccgggcgaggaaccacgcaaacggatagccaagcgccaggcaggcgagggtcgccagcagcgccatgtttagcgaatgcagcagaacgtcataatagagcggatccagtagccgcgaatagttatccagcgtgaagaccagtttgacgaagttggcatcgtcgcgggtcaaaaagctggtggcgatgatcatcaggttgggcaggaagacaaacagcaccagccaaccgacgatagtggcgatcaccacattctggaatttactggtgttcttcatcggccagcaccacctcccagctttccacccaattgatagacattttctggtcaagagagtggtcgaaatccgggtcgtcttcgttaaagaactcgctgaccatcaccattttgccgttctccagttccaccaccgactccagagtcatgcctttatagttgcgctcgcggacatagccgatcaggccatcggcgtcgctgttatggtggatctcgtcgacgcgcagatcttccgggcgcagcaggacatgcagacgctggccggcctccacggcaaaattgacggtgatgttgcattctcgtccttcaacgctggcgcgcacgcgctgttcgtcgagacgttcaattaccgtggcgtcaaagatattgatctcgccgataaagctggcgacaaacaggttcttcggctcttcgtagatctctcgcggggtgccgtcctgttcgattttgccatcacgcatcaccacgatgcgatcggacatggtcagagcctcttcctgatcgtgggtgacgaagacgaaggtgatcccgagcttacgctgcagcgctttcagttcgttctgcatctgcttgcgcagcttgtaatccagtgccgaaagagactcatcgagcagcagcagacgcggtttgttgaccaccgcgcgggcgatggccacgcgctgctgctggccgccggagagctggtgcggtttgcgctgggcaaacgcctccagctgcaccatttttaaggcatccatcacccgtggggtgatttccgccgccggggttttctgcatccgcaggccaaaggcgacgttctcgaacaccgtcatatgcggaaacagggcgtagctttggaatacggtattgacgtggcggttttccgccggaacatgagtgatatcgtgatcttcgagatggatccgtccgctgtcgacgttttccaggccggcaataaggcgcagaacggtggttttaccgcagccagaggggccaagcagagtgagaaactcaccattgttgatggtcaggttaaggttgtcgatgaccgttttaccatcaaagctcttgcgaattcccgccagatgcaccagcggcgaacgcgaacgcggttgtatattcaatttttgactctgtcccatgtagacgcaacggcaaatttccggccgctgcggggtttgtgattaaccacctttggggttgcacgtttttaataagggccagcattctacggcaaacgagggtaatcgccaatccttgatacgcccgcatagtctacctttacaccataacgtcggttccgttattaaatttcgctttacgggctaaaaatgacctgacgcaatatttgtcttttctggcttatgaataatgttgtcacaaaagaagagggtggctacatggataaattgcttgagcgttttttgcagtacgtttctttggacacgcagtcaaagcctggcgttcgtcaggtccccagcacggaagggcagtggaagctgttacgcctgttgcaggcgcagctggaagaaatgggactggtcaaggtaacgctgagtgaaaaagggacggtaatgggaactttgcccgctaacgttgagggcgatatcccggccatcggttttatctcccacgtcgacacctccccggatttcagtggtaaaaacgttaatccgcagattgttgaaaactatcgcggcggcgatatcgcgctgggtatcggcgatgaggtgctctccccggtgatgttcccggttctgcatcagcttttgggacagacgctgatcaccaccgacgggaaaacgctgctcggggcggacgacaaagccggcattgccgaaattatgaccgcgctggcgaccctgcaggcgaaaaatattcctcatggcgatatccgcgtggccttcacccctgatgaagaggtgggtaaaggggcgaagcatttcgacgtcgaggcctttgacgcccgctgggcctataccgtcgacggcggcggggtcggcgaactggagtttgaaaacttcaacgccgcctcggtgacgataaaaattgtcggtaataacgtgcaccccggcaccgcgaaaggggtgatggtcaacgcgctgtcgctggccgcgcgcattcatgccgaagtaccggccgatgaagcgccggagaccactgaaggctatgaaggtttttatcacctcaccagcatgaaaggcagcgtcgatcgggccgagatgcattacatcatccgcgattttgaccgtaagcacttcgaggcgcgcaagcgcaagatgatggagatcgccaaaaaggtcggcaagggactgcacccggactgttatattgagctggtgatcgaggacagttattacaacatgcatgagcaggtgatcgcccatccgcacgtggtcgatattgcccgccaggcgatggtggactgcgatattgaaccgcagatgaagccgatccgcggcggcaccgacggcgcgcagctctcatttatgggactgccgtgcccaaacctgtttaccggtggctacaactatcacggcaaacatgagtttgtcaccctggaaggaatggagaaagcggtgcaggtgatcgtgcgtatcgccgagctgacggcggcacgcaaagggcattaatcttctcaggcggcccggtagggccgcgtgtcggacaagatgccggatggcggcttcgccttatccggcctacggtccagccggtgagcgcggaacccgtaggcccggcaagcgcagcgccgccgggcaggatgatggctcagtcgccaaagaaccagtaaccgctgttgaccagcgctgccagcatggcgaggaaagaaggatcttccagcgcatcgccaaaatggtcggcgcgcagcgtcagatgggtggctaaggcgtccagcgccggacggtgcggggagttgatcttctcgccgttaacgaatacctcgccgtcaatgcgcagcacccgcaggccgcccaggcgttccagggtatcgccctgctgcagggcatcgtaaatctcatctggctgatacggcggctccggcggcgcgacgtcgagctcatgacgcgactgggtgataaactcgccgaaccactgcttaaagtgctccggttggttaatcagacccagcatcatctcgcgcaggcggtcgagttcggtcggtaaaatatccgccggatggtcgcgggacggcacgtccggatcggcgtagcgctggctgcccagttcgcgctggaggacatagtcggcaaagccgctaaacagctcgcgggcattcggcgcgcgatagccgaccgaatagttaagcgagttttccagcgaataaccctcatgcgggaatcccggcggaatatagagaatatcgcccggctccatctcttcatcgatgatcgcctcgaaggggtcaacctgcagcaggtccggatgcgggcagtgctgtttcatcggcaccttttccccaacgcgccagcgccgacggccggtgccctgaatgataaacacatcatactgatccagatgcgggccgacgccgcctcccggcaccgagaaggagatcatcaggtcgtcgatacgccagtccggcagagcacggaacggatgcatcagcgctgcggacggttcatgccagtggttaaccgcctgcaccagcagggaccagttgttttcgctcaggtgatcgtagctttcgaaaggaccgtgactgacctgccattttccatcctgatggctgacaaggcggctatcgacctcgctctccatggccagtcctgccagttcgtccgggcttagggggtcgataaaattggcgaagccgcgcttcaataccaccggccgtttttgccagtagcgttcgataaagtcgggccagttaagcgttaattgataatccatattgatattccactgcaggtgtctgacagggattataacggatgcggcgccctggcgatgcaggcgccgtgaaaaatctcaacgattaactctgtttatcttccatctgctggcggccaaacaccacctccatgcaggcgccgccgagcaggctttccccggcgatgatctctccatcatattgttcgacaatttcacgcgcaacggagagccctaccccctggccgggacgcagggtatcagcccgctggccgcggtcgaaaacggcccggcgctggctctgcgggatccccggcccatcgtcttccaccaggatgtgcagatggctgtcggtggtctggcgcacggaaacttccacgaactccagacaatacttacaggcgttatcaagaacgttacccatcacttccataaaatcgttctgctcgccgacaaaagtgatctccggcgagatgtcgagcgagatattgacccctttgcgctgatagaccttgttgagagcggaagtcaggctgtcaagcagggggcgatcgggtgtaattcccggctcaagagggtgccgccgctgcgcatgctggcgcgatgcaggtaataaccaatctgctgcgagatgcggcttatctgctccagcatcaccggctccgcctcgtcgacgctgatcttctcgccgcgcagcgagcgcagtgtactctgcatcaccgccagcggcgttttcagactgtgagtgagatcggtgagggtagtgcggtatttgtcatagcgttcgcgctcgctgcgaaccaggcggttgaggttgctgaccagccgggtcagctcgcgagtggtgttgggattgagcttttcgcggtgatgttcctccagttcgcgcacctctttggccagcgactcaatgggccgcaggctccaccaggcggcgacccacagcagggggatcaccagcagcaggttggcggccagcacatagacaaaccagctccacaccatatagctgcgcttgagctccaccggaatggtgtcgaccaccacaatgctgagctgaggcattttgctggtggccgggtagaggttgatcgccaccgagtgggtcatctcagagtcgtcgccctgttcgcggatagcgtccagctgttcctgaatctcatggttattgcgcaacagcatactgctgctgtcgacatcggcttcaatctcatggaagccattgcgtttcagccattccggttgaatgcgtttcgccagccatggaacatcacgctgcgcccacagcagtttgccctgctcatcgtagataagggtcaccgtcgggctttccatattcaggttttccgggatatcgacgtcaatagcgccgttttcccatctcgccagcatataaaagagattgctctcgccgcgcagcaggcgaaaggtggttttatcgaagctaacgctatagcccaccagggccaccatgccgtaggccagggagagcaccagcaccaccccggcggtcgccagcaggaagcgaacccgtaatgacagcgggaagatatgtcgcaacagtcccttcatcagcgcaattcgaacagatagccctggccgcgcaccgtggtgatgacgtcctgtgggtattcagcctgaattttcttgcgcagccgacccatcagcacgtcgatggtgtggctttctcgcagttcggcatccgggtaaagctggagcatcagcgaatctttgctgaccactttgccgcggttacggatcagggtttccataatggtgtattcaaaggcggtcagcttgatcggctggtcattcaccgacagctcgcgccgggagaggtcgacctggaacggcggcagggagatcacctgcgaggccagaccgctgttacggcgcagcagcgcctgcatgcgggcggcaacctcttcaatatggaaaggcttggtgacgtaatcatccgccccggcgctcagcacttccactttatcctgccatccttcgcgggcggtcagcaccagcaccggcagcgacacgtcgtggctgcgccagcggcggatcagtgataaaccgtcttcatccggcaggccgagatcgacgatggcgatatccgggagatgttcgcccagatagtagtccgcttccctggcatcttccgccgcatcgacctgatggcccagctcctgcagctgaactttgaggtggtgacgcagcagggcattatcctcaaccacgagtacgcgcatggctgttctccctagcattttcgatagtagtctgacgctcattatatacgcaaaatataaacggctgttaaataaagctttttataaaaagggcccctggtgcccccgggctggccagcattctgcggcgccctttgcgcatactgcatggaactccttcattctatgcgtaatttcagtaaacgcccagcggcaggatgcgaacggcgagcgggttggtgatgttaattttttgtgtaatagtgctggaatcacccctcaagaacgtcgcaggttatccattatgtctcagcagcagagcgcggactgggtcaggctggcgcaatcgcccagccggacggaacgcatcgaagccttcttcggcggccacggctacgaaccgcaccggcatgatacctacgccatcggccagacgatcgccggcgtgcagagctttcactatcgcggcggactccagcacagcctgcccggcggaacgatggtgcttcatccggacgaaatacacgatggcgaggcgggcaccgaggcggggtttcactaccgtatggtttatatcgaaccggcgctgatccagaagatactcggcggcaggccgctaccgtttatccccgacggcttgtcggcggatccacggctacgtcacgccgcgcagccgctgttgaaagcggtcacggataccttcgagccgctggaggaagaggatgctctgtacgacctggcgcagaccctggccgttgtcggcggccaacgttcccgtcgccaggcgtttgattatcaggcggcggagagggcccgggagtatattcatgcctgttttatgcaggatatgaccctcgacaccctgtcgcaggtcagcggccgggaccgctggagcctgagccgggatttcagaacgctgtacggcaccagcccgtggcgttacgtcatgatgcgtcggctcgatttttgccgccagcggatgcgcgccggggaacgtctggtggatattgccgccgacgcgggctttgccgaccagagccacatgacgcgccagtttatcagccgctttggcctctctccggggcgctggctgcgggctatccgcggataaggcggcgcaggttgcacaatcgttcaagcgtcaacgcggcgaggcgaactatgctgactgcctttatcataaggagacagcccatgtttcaactcgttaatcttgctcataaattttccctgttcagcgaacaatggcagcccaaagtggtggctgaaatgaacgactatcagttcaaggtcgtgcgcatcgccggcgactttatctggcacagccacccggaaaccgatgagacattgatggtggtggagggggtattgcgcgtggacttccgcgacgggcatgtgctggtgaaggccggggagatgatcgtcgtgccgcgcggggtggaacataagacctcggcggagacggaagcgaagctgatgctgattgagccgcgcggggtgttgaataccggccacgagggcggcgagcggacggcggtgaacgacgtttggatctgatcgctttccggcgataaaacgcccctctttccggcggaaagaggggcagggcgattacttcagctcgtcaaccatggtggttgcccgaccgatatagttggccggggtcatcgctttgagacgcactttttcctcttccggcagggcgaggctgtcaataaactgcttcatcccttccgcgtccacgcgtttgccgcgggtcagctctttcagcttctcgtacggtttttcgataccgtaacgacgcatcacggtctggatcggctcagccagtacttcccagttgtgatccagttcgtccagcaggcgatcctggttcagctccagcttgctgatccctttgagggtggactgataggcgatcagcgcatagccgatgcccacgccgaggttacgcagaacggtggagtcggtcaggtcgcgctgccagcgggaaaccggcagtttgctggccaggtgctgcatgaccgcattggccaggccgagattgccttcggagttttcgaagtcaatcgggttcaccttgtgcggcatggtggaggagccgatttccccggcgatggtcttctgtttgaagtggttgagcgcgatgtagccccacacgtcgcgatcgaagtcgatcagaatggtgttgaagcgcgcgatgcagtcaaacagctcagcgatatagtcatgcggctcgatctgcgtggtgtacgggttccactgaatacccagcgaggtaacgaactcttcgctgaactgatgccagtcgacttccgggtaggcggcgatgtgggcgttgtagttacccaccgcgccgttgattttaccgaggatttccacctggttcagttgacgatactggcgctccatacggtaggcgacgttcgccatctctttacccatggtggacggcgttgccggctggccgtgggtacgggagagcagcggcacatcgcggtactgggtcgccagatcttttaccgcgtcaatcagtttgcgccagtaaggcagaaccacttcgtcgcgggcggttttcagcatcagcgcgtgggagaggttattgatgtcttcagacgtacaggcgaagtgaataaactctgataccgcgtgcagctcggcgacgtcagcgactttctctttcaggaaatactctaccgctttcacgtcgtggttagtggtgcgctcgatggttttgatgcgctccgcgtcttcaacgctgaaatcggcgacgattttatcaaggaaaccgtttgcgtcggcagcaaaagcaggaacttccttgatcgctgcgtgggcggccagtttttgcagccaacgtacttccacctgaacgcggaatttcagcaaaccgaattcgctgaagataccgcgcagcgcgctgactttatcgccgtagcggccgtctacaggggaaacggcggtcagtgaggataattccatagatcacaactccggggttaaatgagcaagaatttgctttgcctggttaaccagacgattacgggaaaacataagctgcagacgtccgccgcccacctgatgccagagcaccgcggcgcgaatacccgccagcagcgctgagcgaactttcgcctgcacctgcgggctttgcagcacggcaggggagccggtcacctgaatacgcggccccagcgggcttatcacatcgacatagatgcccgccatggcgctgagcagcgtttcggactgcaggtcaaagtgttccagctgacggtgcaggccggcgatgcggttgccgagcgtgtccatcgcccctttactggcggcgagcttgcgctccagcaccatcaggctcagggtatagcgcgtcagttcagcattgaggccctgacggctgctggtattgagcaccccgagcagcgtttcaagaccgaggcgaagattggcttcactgccaccgaacaccgccagcgtcgactcaggatcgaggtcgatgatgctgttcagcgacacatgcagggcatcgctgtcgcaatgtccctgatgcgccagttgctgaaccagtcgcgccgcctggcaaacgccagccagcgccagggtgatgtcatagtaattcttcgccacacatactccttgtcagccgccagggcggttcgtcccggcggaaataacgcgcgttcaggactgcagaggcagtcgttgttcaataattccgccgccgaggcacacttcccctaaatagaacactgcggactggcccggggtcaccgccgcgaccggctcatcgaagcggacttcgatacggtcttcatccagcgcggtaacggtgcaggggatatcggtctggcgatagcgggttttcaccgtgcagcgcagggtgccctgcagcggttcacggtttacccagtgcagctgttgggcaatcagaccgacggacatcaggcgcgggtggtcatggccctgggcgacgataagaatattattctcaacgtctttatcgaccacgtaccatggatcttcgctaccctctttggtgccgccgatacccagccctttacgctggcccagggtgtggtacatcagcccctgatgagtaccgatctcctcgccgtcgacggtgaggattttgcccggctgcgccggcagatagcggccaaggaaatcgcggaatttacgctcgccgataaagcagatgccggtggaatcttttttcttcgcggtgatcagatccagctcttcggcgatcttacgcacctgcggtttttccagctcacccaccgggaacaggctctgggcaatctgctcgtggctaagggtgtagaggaagtagctctgatctttgttgccgtcgaggccgcgcagcagctggcttttaccgtcgacatcggcgcggcgcacatagtgcccggtggcgatgtagtcggcgccgaggtcttcggcagcaaactcgaggaaggctttaaatttgatctctttattgcacagaatatccgggttcggcgtgcggccggctttgtactcttccaggaagagctcaaagacgttatcccaatattcggcggcaaagttaacggtgtgcagttcaatgcccagcttatcgcagaccgcttgcgcatcggcaaggtcggcggcggcggtgcagtattcctcgccgtcgtcttcctcccagttcttcatgaacaggccttccaccttatacccttgctgcagcagcaggtacgcggagaccgaggagtcgacgccgccggacatgccgacgatcacttttttctggctttctgacatggaaatactcgctacattgaacttcgaggcggcgtattctagcacgcgctcaccgttcattcaccccctgtgaacggccagttaaatgcgccaatcagcgacagcggctgccccgggtcctgcaggtagcagcgaatgctttcggcaaccagcggcgagcgcaggttcggcgcgttaagaatttcctcagcactgagccacaggcagcgatcgatatcgctgtcgtgtggttcagtggcgcacagatcgctaagttcgatggcgaacaggaagcgcagaaacggcgtgttatcgggagccagccactgatgcatgcggatgaagtgctgcggcgtggcgcgaatgccggtctcttcccacagttcacgttcggcggcctgcagcagcgtttcattggcctcgagatggcccgccggctggttccacagcgctttgccgttaatggtttcttcgacgatgagaaatttatcctgggcgtgaaccacgcaggcaacggtgacatgaggtttaaacatcgcttttccttttcagttattcggctttgcgccagtcgccgttgggcagtccgtcgagggtatagccgcccatggcgtagcggatcagccgcagggtggggaagccgacgtgggcggtcatccggcgaacctggcggttgcgtccctcgtagagcgtgattttcaaccagcgggtgggaatcgatttgcgctcacgaatcggcgggttgcgcggccacagccagacgggttcctcgacaagttctacgccggcaggcagggtggggccgtcgttaagggtgacgccgtcgcgcaaggcggtcagcgcctcgggcgtgggttcgccttccacctgaacatagtagatcttgccggtgcgcttacccggctgggtcagcttcgcctgcagcgcgccgtcgttggtcagcaccagcaggccttcgctgtcgcgatcgagccgacctgcggcgtagacgcccgccaccggaataaaatctttcagcgtgctgcgcccggcttcatcggtaaattgcggcaacacatcatagggtttattgaacaagatcacagtttttggctggcgttctttacgttgtctggtgacttgttgtgtgctgaatcgctcaacgcgatgttttctaaatgaagttttctgcatggtattttcaggctttatcaattgccgcattatagcctaattacgaatgcctttcatggacgcaaacattcaggtagtattgacatgctcattacaaattattaacaaaaaattgctcaaaccgattcgcactacaggcaggaaggcgacacggacgcgatagctccggttagcgggaagacccggtacgccgaagctggccgactcagccaacaccaggctcgcgtgaagagggaagagcagaaccagaagcgctcgaaggagaggttaatggaaagcaaagtagtagttccggcggaaggtcaaaaaatcaccctgcaaaacggcaaactgaacgtccctcacaatccgattatcccgttcattgaaggtgacggtatcggcgttgacgttaccccagcgatgctgaaagtggttgatgccgccgttgagaaagcctataagggcgagcgtaaaatttcctggatggaagtttacaccggtgagaaatcaacccacgtctatggccaggacgtctggctgccagctgaaaccctcgatctgattcgtgactaccgcgttgctatcaaaggtcctctgaccaccccagtcggcggcggcattcgttctctgaacgtggcgctgcgccaggagctggatctttacgtctgcctgcgtccggtacgttactaccagggcaccccgagcccggttaaacacccggaactgaccgacatggttatcttccgtgaaaactcagaagatatctatgcgggtatcgagtggaaagccgactctgcggaagcagacaaagtgatcaaattcctgcgcgatgagatgggtgtgaagaaaattcgcttcccggaacattgcggcatcggcatcaagccgtgctctgaagaaggcaccaaacgcctggtgcgcgccgcgattgaatacgcgatcaccaacgatcgtgattccgtcactctggtgcacaaaggcaacatcatgaagttcaccgaaggcgcgttcaaagactggggctaccagctggctcgcgaagagttcggcggcgagctgatcgacggcggtccgtgggtgaaaatcaagaacccgaacaccggcaaagagatcgtggtgaaagacgtgatcgccgatgcgttcctgcagcagatcctgctgcgtccggcggaatacgacgttatcgcctgtatgaacctgaacggcgactatatctctgacgccctggcggcacaggttggcggtatcggtatcgccccgggcgccaacatcggcgacgagtgcgcgctgttcgaagcgactcacggtactgcgccgaagtatgccggccaggacaaagtgaacccgggctccatcatcctgtccgcagagatgatgctgcgccacatgcagtggttcgaagccgcagacctgatcgtcaaaggcatggaaggcgctatcgccgccaagaccgtgacctatgacttcgaacgtctgatggaaggcgctaaactgctgaaatgtagcgagtttggcgacgcgattatcgcgaatatgtaatcccattgatggattaagtaaaagcgggagccgatgggctcccgttttttttcgccttcaggcaattattctgccggacgcttgaagcattaggcgatggcgaatgtcccgcagcgcaacgttcaacaaagctatatacctcatgacagggagagatccatttgccgtaagagctcgcatgaaaacggattgcacgccaggcgtcatactgatggcccgaccggcttaaaccggggccgttcggcgaaaatgtgctgtagcctaaactcaggctatccgcgcactttcagattaaacagccgggacagcgccgctttgccgctatccgtcacttgtacttcccgatatcccggtgcgcgcgttatccatcctttttgcaggaacagcgtcattagcgccgagccggcgtcgcctcccagatgaaaacgtctttcgctccagtcgagacaggggcagcagggcttacgccgtgggcgggcgttcagtactgcgccaaggcgttcaagctgggttttaccggctgacgtcagggccaggccatctgccgccagccatttttccctcagcataaattcataaatattgaccgccagctcgcccgccagatggtcgtagcaggtgcgtgcgtaacgaagattaaccggcgtgctggggagaagcgtcttatgcgcctgcatagagacgcccatcaggttttccagcagcccggcaatatgcgagcccgccaggcggtaatagcggtggcgcccctgcgcgagacacaccaccagtccgttgctgagcagccgggcaagatggccgctggtggtggaggcggacacctcggcgaccgtactgagttcggttgccgtccatgcgcgcccgtccatcagcgcgcagagaatactgacccttgacgagtcagagagggcggaggccaccatcgccatagcggtttccagcgcctcctctggctcactgtcttgctgcggtttcaggagattcattcagaaagtatggcccattttttggtcacttccgctgcccgggcgtcatcatcggtaaggagaatgagccggttacggtggtcgctgtactgtaccagaatattaataccattatgggccagggtgtccgcgatgtctcccagttccccaggacgttcctgaggtaactttcgtatcagaggacggcatacattgctgaccgtaaagccggcctcggtcagcaccctgcgggctgtctcaccgtcttccaccagaaaatgcgcatgtcctgcatcaggcgtggtgaatacgccgccgccttcgagccccacgccgttgttacccagcgccatacccattgcgccaagcgagcccggcgagttgctgagaatcacgtgaatgtcatacatctgactgtgctccccgatccgatgcgtaatcccggaacacgcgggctacgcgtattctgtaatatgaaaaaatcgatgctttgccttcgcgctgggcagccagatgccgctcattttgctgccagttggccaccgaggcttcatcttcccaccaggatagcgagaggattttgccgggcgtactcaggctctgaaagcgctcaatggcaataaaccccggcgtgtctgaaagcaaaggcgtcagcccggccgccagctgaagatatctttcctgtgcttgtggtaaggcgtcggcctcaaaaagtaccgcaatcataagtctgctccgtggtgaatttcccggcagtctactgacggccagagcaggaagcttcggtgtgcagcgaaatatgcctggcaggagatcaacgattgcaacggaaatgctcccaggcgttattgcgatggtgaataaaaaagaacgccagccatgcgatacggcagcctgagcgcacagggctggctgagttttagtgaaatcgcgatgtggggagataaaccctgacggctgcggctatcgatgaaagcgatcgccgacgggcagtacgggcgggaaagccgttttactgacatgcagaatatgaacccggaaacgctcgcccggactagcgaagcgccgccgggcgataatcgaaagagcacgttgtctgccaccggtcacgccttcaggctccgcgctctcctcgggcgtggatttttaccttagccgggagacctgcgtctcgcctactgtgcatggcggcgcagggtggaggcggggtggcgccgcagcgcctcttcgggacgcacagggcgccgcaccagttcgccgccgcagttcgggcaatgtccgttcagtcgcgtcgtcatgcagtcccggcaaaaggtgcactcgaacgaacagataaacgcctcgggtgagtctggcggcagatctttatcacagcattcgcaattcggacgtaactcgagcatcaacttctcctctggtgaacggctatatcagcgacggcgggccaaagcacgctatgtttatatcatgccgcgatcggtccgccgagaatttccttgcgcggtaatcgccttctcagagggtcgctttcccgggctgcattcccggtacgaggatcactttgcggcacgcctcttcacgtttctcaaagatctgatagccgcgcgcggcctcctccagcggcatatggtgagtgacaatctcctccggggtaagcagcccttgctcaataagcgccagcagatccggcagccaggcgtggacgtgggtttgtcccatcctgaaggtcagtcctttatcaaaggcatcgccaaacataaagccgtggatgaaaccggcgtaaaccccgggtacgctgacgatgccgccgcggcgcacggcggcgatgcactggcgcagggcttttccgctgctcccctcgattttcagggtgctgaggacggtttccgtaaggctacctttcgcctcgaagcccacggcgtcgatcaccgcgtcgacaccgcgatggcccggcgtgttatcgataatccactgcgcaggatcgtcatggtggtcaaagtttatcgggatcgcgccatagcgttgttgcgcgaaatcgagtcggtaatcgttatgatcgatgataaatatctgttctgcgccattgagcctggcgcaggaggcgcagagcaggcctaccgggccggcgccaaaaatagccacgctactgccgggtttgacctcggcgtttttaaccgcctgccaggcggtgggcagaatatctgacagaaacagcaccttttcatcgggtaaggtgtctggcactttaaacggtccggtattggctttggggacccgtacatattccgcctggccgcccgggatcccgccgtacaaatcgctatagccaaacagcgccgccggtggcgaaatgccttttcgattgagcgtcgctccctggccgctattggtgctttcgcaggcggcatactgctgcaagcgacaaaagaagcagtctccgcaggcgatgacaaacgggataaccacccggtcgcctttgcggaccgcggtgacctcggaaccggcttccaccacttcccccataaattcatggccgaaaatatcaccatggtgcgtgccggggatctttccgcggtacagatgcagatcggaaccgcaaatcgctgtcgcggtgacgcgcagaataatatcgtccgctgcctcaagagccgggtcaggcatgttgtcgacgctgacatgatgcgggccgtgataagtgagtgctttcatagaatattctcctcgagagaaaggttgacagcatgcggttcttcggcctggtgaacggctgctatcgtcaccgataaatcatcgtaaaaaataaagcgtagagtactaataatggaactgcgtgatattccaggggctgaatatattccacgcttcgcttatttcccggctggtctgttcgagttatttgcctattgcccttatgtgtgccagtattaatcgggcatgatattcgctccattttgtttgctagccgcttccccagcggcttttttttattcgtaaaatcagggaaaattcttaatttccgtctggcaaaggacaatgctgccgcttcgttatataacccaacggtagtaatcctccggtatagataattctttgccgcagaggtgatctgcatacattatttccctgaacacagtgagttagcggcaaggtgccgtctggttatttttgaggtgtcttgtagaattattccgaattactgctaaaaggtgtcgaaaaaacggaataataatttgactaaccagcattacccgctagatttaaatatcgaacgacgagtgatacggaatattttcgtatcgtactgacataaccgatatacatgaggtgaaatatggcagagcatcgtggtggttccggtaattttgctgaagaccgtgaaaaagcttctgaagcaggtcgtaaaggtggtcagcacagcggcgggaactttaaaaatgatccgcagcgtgcgtccgaagcgggtaaaaaaggcggacagaatagccacggcggtggccgcaagtccgataattcctgattatccttttccttgcaccctgaagtgaaagtatctcctgcgagtctgtcacagactcgcagttattttctgactccagaaggtatttctatgaatatgaaaagcattgaagatgtatttattcacctgctctcagatacctacagcgcagagaaacaattaacccgcgggctggctaaactagccagagcggcgtccagtgaaaaactcagcgcggcgttcaatgctcatcttgaagaaacccagggccagatcgaacgtatcgaccagattattgaacaggaatccaacctgaaaatcaaacgcatgaaatgcgtggccatggaaggattaatcgaagaagctaatgaagtcgttgagagcacggaaaaaaatgaggtacgtgatgctgcattaattgccgctgcgcaaaaggtcgagcattacgaaattgccagttacggtactctggtcaccctggcagagcagttgggctataaaaaagcagccaaactgcttgccgaaaccctggaagaagaaaaacaaaccgatgtgaaattaaccgatctggcggtaggtaatattaataagaaagcggaaaaataaactctccctgacacgaggaaatcacgatgaatcacgttgaacattaccatgactggctacgagatgcgcatgccatggaaaaacaggcagagtccatgctggaatcaatggctggccgtatcgataattatccggatctccgtgccagaatcgaacagcatgttaacgagaccaaacggcaaattaccgtgctggaagagatccttgaccgcaatgagatttcgcgctcggtgattaaagattcgatgagtaaaatggcggctctcggccagtccatcggcgggatgtttccttccgatgaaatcgtcaaaggctcgatcagcgggtacgttttcgagcagtttgaaatcgcctgctatacctctctgctggcggccgctgaaaaagcgggcgataccgcctccatcccagccattgaagccatcctggcggaagagcgggaaatggccgactggctgattaaacatattcctcagaccacggagcagtttctcctgcgttcagatgctgacggcgtagaagcgaaaaaataacccaggaggcaggcctatgtttcgtcatgtgaaacaactgcagtataccgtacgcgttgctgaaccgaatccggggctcgcgaatttactgctcgaacagtttggcggccctcagggcgagctggccgccgcgtgtcgttatttcacccagggattaagcgatgacgatcccggccgcaaagatatgctgatggatatcgcgacagaggagttgagccatctggagatcattggcactttggtcggcatgctgaataaaggcgccaaaggagccctggcggagggcaccgagagcgaggcggaactctatcgttcgctcaccgccaacggcaatgacagccatattacatccctgctgtacggcggcggtaccccgctgaccaactcggcgggcgtgccgtggacggcggcctacattgatactatcggcgaacccaccgccgacctgcggtcgaatgtcgcggcggaggcgagggcgaagatcgtctatgaacgcctgatcaacgtgaccgacgatcctggcgtgaaagacgcgctggccttcctgatgacccgcgaagcggcgcatcagctctcttttgagaaggccctgcagtcgattcgtaacaactatccaccgggcaaactgccgcccattagcgagtacgctaacacctactacaatatgtctgaaggtggagaagtacgcggcagctggaacagtgacaaacacttcgattatgtcaaggatccacagccggccgtagatggcggagatggcagtgcttctgtcggcctgacgccagagcaggaagcgctgtgcaaagcgatgctgaagcgaacgcagtctgacccgcagggcgatcctttgaccggcgccgaactcggcgccgggaagcaaaacacttcatcatcagctaagtgatgttcgcatgagccccggctgcggccggggcgattcacaatgatgggtgtggaatatgtttgaattcgacgcgtttcatctggcccgattgcaattcgcctttaccgtatccttccatatcctctttccggccatcaccatcggccttgccagctaccttgtggtgcttgaggggatgtggctgcgaacccgggataatgtctggcgttcactctacaatttctggctgaaaatctttgccgtcaattttggcatgggcgtagtctccggattagtcatgtcctatcagttcggcaccaactggagcggattttcccagttcgctggcagtattaccggcccgctgctgctgtacgaagtgctgaccgccttcttccttgaagcgggattcctcggggtgatgctgtttggctggaataaagtgccgccagcgctgcatttttttaccacctgcatggtggcgcttggcacgttggtttctaccttctggatccttgcctccaatagctggatgcagacgccgcagggttttatcatcgaaaatggccatctcatcccgcaggactggctggcgattatctttaacccctcttttccgtatcgcttgttccatatggcgatagccgcgtttctcagtagcgccatgttcgtcggggcgtctgccgcgtggcatcttctgcgcggcaacgactcgccggccatccgcaaaatgctgtcgatggcgatgtggatggcgctgctggtggcgccgatccaggcggtggtgggggatatgcatggtcttaacacccttgagcatcagccggcgaagatcgcggccatcgaagggcactgggaaaatcgccccggcgaggccacgccgctgctgctgtttggcctgccggacatggagcaggagcggacccgctatggtcttgagatccccgctctcggtagcctgatccttacccacagcctgcataagcaggtgccggccctgaaagacttcccgaaagaggaccgaccctattcgcccgccgtcttctggtcgtttcgcatcatggtcgggatgggcgtgttgatgatcgccttagggatctgcagcgcctggctgcgctatcggcggcggctgtaccactcgcgtcccttccagtggtttgcgctctgtatggggcccgccggtcttattgccctggtcgccgggtgggtgaccaccgagatgggccgccagccgtgggtgatatacgggttgctgcgcacgcgggatgcggtgtcgttgcacagcaccctgcagatggccatcagcctgctggtatttatcgtggtttactgcgccgtgtttggcgtggggtattactatattttccggcttatcaaaaaagggccgcagccggtgactgagctgacctcgcaaaccgcaggcaccccggcgcgtccgctctcagcggctgagccggtgcgtgatgaggagaacgcatcatgagcatcgatatctcggtgatttggtttgtcatcattgtcttcgccacgctgatgtatatcgtgatggatggtttcgatttaggtattgggatgctgttcagcgtggtgcatgatggcgaagagcgcgatgtgatggtcaacagcgtcgcccccgtctgggatggtaacgaaacctggctggtgctcggcggggcagggctattcggcgcctttccgctggcctatgcggtgatcaccgatgcgctggttatcccgctgacggcgatgctcatcggcctgatttttcgcggcgtggcctttgaatttcgttttaaagcggttccctcgcatcgcatcttctgggactatgcctttgccggcggctcgctgttggcgaccttcagccaggggattgtcgtcggcgcgtttatcaacggctttgcggtggctgaccgccgcttcgccggttcgacgctggactggcttacccctttcaatctgttctgcggtctggggctggtggtggcctatctgctgctgggcaccacgtggttgattatgaaaagcgaaggcgcgctgcagcagcggatgcgcgagctgacccgcaaggtactgctggcgctgatggtggtgattgcggtggtcagcgtctggacgccgttgggctggcgctacgtggcggaacgctggtttacgctgcccaatttcttctggttcgtgccggtgccaattctggtgttggctctgagcctgtggatctggcgcctgagcgcgcgccccgccagccacgcccgtccctttatcctgacgctgggcctgatattcctcggcttcagcgggctggggatcagcgtctggccgaacattattccaccgcatatctccctgtgggatgccgctgcgccgccctccagccaggtatttatgctgccgggggcgctgctcattatcccggtgatcctgatgtataccgcctggagctactacgtctttcgcggcaaagtctccggcagcgagggctatcactagcctgattcgcgccggcaggtgaggatttgctggcgcgtcgcgccgtccggtcagggatgaccgagagggatgcgcacaaaccggtgatctgctgcaacgactctggccgggtgtttatgccttcggcggcttgatcttaataataaatcgttcgttaacccgggtgatcctcgcgccaatatcgccaaactcggtggcgattttaaaaaaatcgtccgcggcgacatcaaaatcgagttcaatcttcgggtgttgtcctgtcgccagtaattcatagaaatggtcaaggctgcgggctttttcgctaggcatcttatttctccatggtaaaccaatctgcaggggttttattgcttacggcgcttttacggattattcagcaggatgacaaacgtgcctgatataaaattatgcaatgacagtaagaatgaggcagggcgaggttattccgtgttgttaaaccgcgtggcgacgcgttgtccgccataccatgacggcagagacgaccctgcggcgccggttgatgatagacattttttgatgacaaattaatgacaataaaatgaatctgtccgggctcgggatggcatcgtgctaaataattttattctgtggctggtaaggtggttgttaactactttatggttatggagcgtcttttttagggccaacggcgagggaacaacgatgcaattacttgatttattcgcaggcttattatggttaagcagcgttatcttcctgctgtttgttcttgatgtgatcatcacccgttatctttatcgtaaataatcgacaacgacagcggcgttgggcataggggacggcgtcggaggatgataatataacccgcggaatgattcagaaaggaatgcgcggtggccgggagaattgattacgatattgaaaaataccagtttaccgaagccggtgagacgccacggctccgggagcagtggcgcgaagtatacctggagtgtcgtcagctgcgggccggggcagaggagcgcctgcgcattgcgttactgaacgtcgactatgtcaccagcttcgagctgccttttcgcctgctgctggtgcgtgcgccgcagctaatcgccgatgttcgcgagacgttgcagcttagccgtaaagctgccgttttcaacggcaaacgttacggctgcgtctatagtttgaaacaggatttacaggctgtcccggaagcctttcattaccgcctggcaaaccgcattcgtcgcgtcgatgcaaccgggctgacggcggccccgtaccagcagattgcccgggagataaagccggcccgggagcggctccgccaggcgctgaacgccggcctgccggtcaccgctctcgacgccctgttctggttcggcagtcagcgagtggcggcggacatcgcgcagttgcgccggtccggcatggcgattgtcacgacggaggtggaggtcagcgacaatttgttcaataccacccgacgagtgcccgtttaccgcctggccagcgagtgaatcggcgacctttcgcccagccgttgcctctgcagacagttgaccattgtcccgtcgaaccagacgcacagccctctggcgacaggccgcggggtcagttccagccatgcgctggcgatgagcatgaggagcattagcgccagtggaaccatgtattttcttttcactgccctttatccgctgcgcctgttctgccagcaaggtagcggtaaagtatgacgtttcgttgaccggggcagcgtttttattatcggcaagcggttgcgttgggccagagattattcatcttttggcatacgagaggacgaaaactggcggcttgtatttttgatttttattacaccacgcttttttttgccgccggggaaaagcgtaatgtggctacgaatggatgcggctcgtcatgtaactggctggtttgaaacaatattttaattgttgtctaaacgcatgcgacagcggtggctaatttatattaattcactttaccgatcaataaattatatgttgatagtttttagctatcgaatgtttcttatcgatcattttaaactatttttgttggcgggaaatatatgacatgctttaaccctttcttatttttggtattttttaaatggttgaagaaaacgcgaaaaatacctcctatcgcttcgtactggagcccgctattagcgatgatggcagctgccactcgtgggaattgctcactaaagatattatagcacccgcacgaaataacgcctcagcgcccgcgttttctttctccacgcttaccgaaagcgataagcttgcactatttacccgacaaatcgagttgctttccgtatttgatttttccctggtcgataataagccgatctcgctcaatatcgatgatttattaagccattttattctgacggaccgctatctctgcgattttctgcgctcgtgtaagcatattgctttggagataaatgagaattttcatgagtttatcgccggccgcgagctgacggcgctaagcacgctggcggcgctttgtccggtctggctggatgattttggtcgcgggcgaacctccttcccgctgctggagagattccgcttcgattgcgtcaaagtggataaggactacttctgggataaagaaaacgaccccgctttgcccggtctgttgcagtctattcataccctgaccggccatgtgatcgttgagggtatcgaaaccgaaaagcaaaaacggttaatcacttctgccggggacatcataggtcagggccgctactggaaggaagaatatatttttctttgcggttgagggtcgaccgggggctggtttcggttacctgctattcttttattatccagttttaaattccccctttgctactgatagtctttattagcgcagtgataagcgcctctcttttttatgaaggatcattccctgtaaatacccccatgcgtaacgccccgatcgccatttcgacgtaagccaggtgctgacctctgagctgcgcgagctggtgaaaaaagatctcgccgctgcgatcaattaatcctgcctgcgccatccgctcaggatcgcgcggcatggaaaaatgccgccgtttaccggcggctattgcttattttgcgctaccctggtttttttccagccgggcgaaatactccggtgcaaacgggcgcggatcgacgtcggcaaacggcgcgcgctcaaagtgcgatttcagcgcccaggggaccgtgcagtcaaaaatggtcttgcagctgatgccatttccacggatcgacgggctgtattccggcgtctgggacggatccagctggtgaccgcgaatgccggggattgtcgtaatgctgacgtccccctgcatgcgggtggtcatcgcccacaggatatcgtcgctgtcaaagatgtcgacatcttcatcaaccagaataatattttttagctcggaataggtcgccagcgccagcagcgcggcctgcccctgccggccttcatcggcgggttgacgttttttcacctgcaggatcccgaggaacttaccgccacccgcggtgtgggcgtagacattttgtaaaaagcccggaatggcggcctcgacggcattccagatactggcttccgttggcaggccggcgagggtggtatgctcttcccccggtcccaccagggtctgcagaatcgcattgtttcgcatggtcactgctttgactttgattaccggcagcgacggattagcgccgccgcagtagccaggaaattccggcatcgcgtggccgctattggtgtgctgatcctctctgacgcgcacgccaggcaacagctcaccttcgataacgatctcggcgcgggcgatggctttctccgggacgctgacgccctgaaccagctccaccggacgttgacgcagcgcgccggcgacgcccagctcgttatagccgaacggcgtggtaggggcttcgaagcaggcgccaatatagatggccggatcgagacccatattgatggttatcggcagcggtttgccggcggcctcggccttctggcgaaacacttcgatatggcggccggcggcaagaaacatcgacagctcatcccggccctgaacgcacaagcggtggatggtgacgtcggtcagcgaggcgtcgtcgggatcgctggccagcgccaggcccaggcagaagaaggggccggcgtcgataggggtgttggtgggcgccggaagcagggtgcgcaaatcaaaatccggatcgtcggccagaaagatctgttcctggcagggggcgctgctggccgggacgaccaccggcgcgaccggttttttcaccgccttacccacttcaagggccagctgcgaggcttcgcagcccagcagcagcgcggcccgctggcggctggcgtgcatacccaccagaatgcgcgagtgtggataacccttaatattgttaaacatcatcgccggcccgatgcgagtggggcgcttcacggtgccgcccgcgccgatatggcgataaacaccggccagctcggcgttagggtcaaccggatgatcggtttcgagatactgattgtcatgctgttgcagcagcgcgatggcgtcgcgcagatcctgaatcggtgcggtcatgatgttctccttagcgtatcgatgctcacagtatgcttcgcaggctaatggttatcaattgcatcatttatgctttattgataagctttttcttatctatttgtagggaggagtccgaccatgtccttgcgagcgttacgccattttgtggtcgttgccgaagagttgcatatgcaccgggcggcggagcggttacatatcgcccagcccgccctcagtcagcagattaagcagcttgagcagcgcctgggcgtggtgctcttttcccgcgccaaccgccgtctgactctgaccgccgcgggcgaggcctttttacacaagacgcggctggcgctggaaatggccgatcaggcggtgctggacgcccagcgcaccgcgcggggcgagcaggggaggctgcatttggggtatgtctccagcgcgatgtacgacagtaaactgccggggctcctgcgccggctgcgcgccgactggccggggattgagctgtcgctggtgcagggggatgtgcaaatgctctacgaagcgctgttggatctgcgtctggatatcgccatcatccgcgcgccgctggcctcgccgccggacgcgctggtggtcaggccgtttgtacgtgaaaagctctgcctggccctctatcaacagcatccgctggccggcgtgggcgcgcttaatctggcctcattgcgcactgacaactggatctcgcttgacgatccgcagggcaccggactggagcaggtttttatggatgcctgtcgcgtcgcgggctttacgccgcaggtggcgcagcggattaacgacgttacctcgatgattagcctggtctccgccggggtgggagtggcgttggttccgctctcggcgcgggccttacgccttgataacgtggtgtatatcgatctccaggatcggctggcggagagtgagctgagcatggtttaccaccgccatattcgttcggcggtggtaaggaaagttatctcgctgcttaataccgctgagcgatagtcccggttagctggtcttcaggcggccaaagctgacaatccttgaacggcccagctctttcgcccggtacagcgcggcatccgccgcgcgaagcagactatcgctttgggtgtgctgcgggtagctggcgatgccaatcgacacatccacctggcctatctcggtcagaccatcacgcagcgtcatattgcgcacctgggtgtagatctcgctggcgcactggtgcgccccggcttcgtcaatcccggggagcagcactaaaaactcctcgcccccgtagcggaaagccatgccgatatcgcgcaccgcgcgctgcacaatggtcgcaacgctcttaatcaccagatccccagcctcatggccatagcgatcattgatggttttaaaatgatcgatgtcgatcatcagacagctcagcggagtatgggtatggaccgccagcgccatctgcgaatgcagcgcttcgtcaagatgatggcggttacgcaggccggtcagggaatcgaacagcgctttttccagcagggcgctgcgcaaacgctgattggccagcgccaggcccaacgcttccgccatcagctcgagataggcccgggaaggagcgtcaccggcggtgacgttctggaaggtcagcaggccaatggcttcgccctgggcgatgagcggtacgcagagcgactggccggcgtgcgtctccggcagatgatagcaggtgatatcgggctcgccctgcaccggcggatggctgagtccccgccgtatcgcccagcagtcgtcgggagaaaagggcgtcgtctcaccggcgggcgacagccactgcgctacgcagcgcatctgccaggggtcggtatccagaacatacagtttaccggggatcgtcggggcgatattcggcgcaaaccgctccgccaccttaatcacatcctcaatggtttcacagccctgcagccgctgagtcatacgcgccagcagctcgcggatcgcccagtcggcgtcgcgctgctgctccagccgctggcgggccaggccgttctcgcgaaaaatgcggatcgcctgagccatgtcaccaatctcatccacctgggtaaagtgcggcgtctctaccgcataatcctgggaggcgagacgctggactacgtcgctcaggcgaaccaccgggtagagcacccggcgtttgagaatgaagccgaggacgaacaaaaacatcagggcggtcaggccgaccatgatttccgacagcgtacgccagatccgcgagcgctcggtggcctggtcgatagcgacggcggcgcgatgctcaagcatctggcggaagcgatcgatctgcgtctgcatgcgctccagttcagtctcgtacgcggtgccgtacagcaccgcgatggccgctggcgcatcgccgcgagcgacatgcgccagggccgcctgctgttcatcctgtagctcattggcgatccgcaggccatcctggagcagcgccagctcctcgcggctggcgccgttatctttcaggccgcccagccgctgctctatgctcttgtcggtctgctgcagctgctgatattgcgtaagcgtctccggcgaaggctttatcacgtacagccgggcgaggtcagacagcgcccaggcgtcgttttccacctcgtcggagagggtatcaaagacctggcgctgctgtaccgcctggcgttcgacgcggtcggcgctggaggccatgagcatagcgctcccggaagccagcgtcaggccaacggtgatcccgtaagcccagttagtgatggtggcgattctcaccgtgaatttccttgcatgcagatgaagctgttttgattatagaactccgcccccgccacgacggcggcccgcttcagaggcggcgctcgctatgcagaggggcaagggtctgaagaatgatggcgtgtagcgtttccgcatggtggcgcaaaacgaggaagacatcgctatccagagcgccatttataacatccgcttccataatctgtaaggcttcctgccaggccatccctttacgataagggcgatcttcggtcagcgcggtgaaaatatcggcgatggagataatccggtcggcgagggtcaggtgctccttttcgagatgcagagggtagccgctgccgtccattttttcatgatgattcgaggcccagttaatgatgtcgccgagctcgctatagtcgctgagaagttcgccggtcatgtagctgtgctcccgcacctgactcagctcctcatcatccagctcgccctctttttcgagaatggagagtgggatatagaccttgccaatatcgtgtagatagccggctatctgtatttgctgacaggtgggctccggcagctgcatccagcgggcaagctggcgggcgatttcccccaccatgatgctatgggtggcggtaaagctactgtaggtgtcgacgattttggcaatcagcaggcagacatccttcagaccgtgaatatccagatagcgcgtgttgatggggccaataatctccagcagccgctgaatatggccggggtgaaggtgctgccagaagttcgcattttcagcgacctcgcacaggatatcgcagagcggcggatcgatctcccgatgcaaagcgacgaactgttccaccaccgcccgcgtgggccaggcggcaacgtggctatcggccggcagcagccgttcaaaggcatcagcaaaatagacaatgtgctgttcgcgggagccccggtggttcgggctaaaatggtgatcgcgaataaagggaacgatgggctggaaggtcgctaatccctccagcatcgccacaccctggcgctgatgcgggtcgtggatattatcgatagcatccagcgaatgaatggtgcgtttatcccccagcacgccgatatcgtgcagcagcgcggcgcaaaaaatggtctgctgccgttcgtcaggcagttccagcctttgcgccagcgtcagggcgattaaggccgttcgttgcatatgccggtgcagttcagggttaatgatctggatgactctggtggtcagcatcagggccgacttcagggcaatacgcatctctgttctccgttcgcgtgacctggcgggcaaaaatgctctcgccggtgacggaagtgtcgataatctgatcgcaatgcgtgttgtgtgttgctgaacaggtaaatactcagaatgttttggttcatagctctgcccgtttcagatccagtggtgcaccagagttgggcgatatcgtcctaagaaccttattattgtctgatagttaaccatttcccccccagaaaagaaatgaattctggcaagccctttgcattaagcaagcgtaagtttgattaatgtctatgaagggagtgacctgtatgaattttagagcattacttgccattgcgttattgacgatgagcagcctggcgtttagcgagacgcgtcttccgcatattgttattttagccaccggcggaacgattgctggttcggcggccagcaatacccaaacaaccggctataaagccggggcgattggggtgcagacgctgattaacgccgtgccggaaatgagtaaaatcgctcacgtcgagggcgagcaggtggccaatattggcagtgagaatatgaccagcgatattattctccagctctcgaagcgggtgaatgcactattggcccgggacgatgtcgatggcgtggtgatcacccatggcacggacacgctggatgaaaccccgtatttcctcaatctgacggtgaaaagcaacaagccggtggtctttaccgcggcgatgcgcccggcgacggcgatcagcgccgacgggccgatgaacctgctggaagcggtcacggtcgccgccgatcctgatgcccggggacgcggggtaatggtggtgcttaacgaccgcatcggcgcggcgcgctttgtcaccaaaactaatgccacttcgctggataccttccgggcgcccgaggagggctatcttggtgtcgtggtgggcggaaaaccccagttcgagacgcgggtggataaaattcacacgctgcgctcggtgttcgatgtgcgtcagctgaaggttctgccgaaggtggtgattatttatggttaccaggacgatccggagtatatgtacgatgcggcgatcgcccatcatgccgacggtattatctacgccggaaccggggcggggtcggtgtcggtacgtagcgccgccggtatcaaaaaagcgcagcaggcgggcatcgtggtggtgcgagcctcccgtaccggcagcggcgtcgtaccgccggatgacagccagcccgggctggtggccgactccctcaacccggcaaaagcgcgtatactgctgatgaccgcgctgacgcagactaaagatccgcagctgattcagcaatatttccatacctactgatcctctgcggcgagggcgtttttcacaccctcgccgtgctttcttctcaatgacctggcttccatgcaaatcgatggcggatgattgcccatcattcactccacctgtgtttcccacgaggcgtaaaaaaatattttttattgtccggcgggcacagtatttcaatgcaccgcgcttattttaaaagcaggtttaaataagtctattcttaattgttgtcttaaagtcgttttaatcttttttatgctgacggattaaaaaagatgcatttcgcagtgggacgcgtttaatactcgctttgacagactacgatgcatcccaacgcggtcagaccgccgatcgcgcggctcagcggacgcctgccaccggcggccagggccgcactgcggcagctttcggttgttttcgttagtaacgctgatgattagcgtgaaaatgatatgcatgatgaatatattaagcgtggttcaagatttaagtttacatttagtaacatatgtgccgcaattatgtttttttgtcagcttgctgttttttacttgccggagggaatttcagcggattagtattgtcgaacttgctgtacgtaccgcctaatgatgataaatggattctgttttccttaagcgttaccacataattaatgtttacaggaaaaatcatggcctgcgtatttaataaacaacttttacacccgcgtaactggctgacctggttcgggctcggcatcctctggttaatcgtgcaactgccttatccgctgctgcattttatcggcaccagcgctggtcgcctttcccgtcgctttcttaaacgccgcgaacatatcgcccggcgtaatatcgaactctgcttcccggacatgtcgccagcggcgcgcgagacgctgatcgatcaaaactttatgtcgctgggaatggggcttatcgaaaccggcatggcctggttctggagcgacgagcgggtcaaaaaatggtttgatgtcgaggggttcgccaaccttaatcacgcgcttagcggtgggaaaggggtaatggtcgtcggcgtgcactttatgtcgctggagctgggcgggcgcgcgatggggctgtgtcggccaatgatggccacctaccggccgcacaacagcccgctgatggagtgggtgcaaacccgcggtcgcctgcgttcgaacaaagcgatgatcgatcgcaacaatctgaccggtctggtgcatgccttaaaatccggtgaagcggtgtggttcgcgcccgatcaggattacggtcccaagggcagcgtctttgcaccttttttctccgtcccgcaggcggcgaccaccaacggcacctatgtcctgtcccgcttatcgggcgcgaaaatgttgagcatcagcatggtacgtaagctggatcgccggggctatagcctgcatatcagcgaggtgatgaatgactatccgggtgaggataagcagatcgccgccggctatatcaacaaggttattgagcgcgagatcctgcgcgctcccgagcagtatctgtgggtacaccgtcgttttaaaacccgcccgctgggcgaaccttccgtctattaaccttcccgcacaggctgcgctttcaaaatcccgacagttggggtaacgtgagccggatcatgttttagtcgtgcgcgaaggagtgcagagtgttcgctgagtttggtgttctgaattatttaacctatctggtcggggcggtgtttatcatcctcgttcctggccctaatacgtttttcgtgctgaaaacgggtattgcccacggggtgaagaaaggctatctggcggcggcgggcgtctttattggcgacgcagtgctgatgtttctggccttcgccggggtggcgacgctgattaaaaccacgccggtgttgtttaacgtcgtgcgctacctcggggcaatttacctgctgtggctcgggggcaaaatgctctatgcggtgctgacccagcgcgacggccagtccgacgccagcgcggagccggcgagcgcgatcctcaagcgctccctgaccctgagcctgaccaatccgaaagcgattctgttctatgtgtcgtttttcgtgcagtttatcgatgtcaacgccaaaacccccggcgtggcgttctttatcctggcgctgaccctcgaggtgattagcttctgctatatgagctttttgatcctctccggctcgtttgtcacccgctacgtcaaaacccgcaagaagctggctaaacttggcaacagcctgattggtctggttttcgtcgggttcgccgcgcgcctggctaccctgcagtcctgatccccacgggccggttacccgctgaccggcccgccgtctcttattctgccctgtaacaaaaacccttcattttttattgcattggtgttacatatacagccgtttatcgctcagcaaaaaggaagccccgatgattctgcaaaaactcctcagcaataaaaactgcaaaaaatactgtctgtcgctcgcggtggtgtttgctatcgcgctggcggtagtggggcgggcgaccttcgggggcgtggtgagcgagtacaatatgccgtactcagagtggacgacgtccatgttcttcctgcagggggcgatggtgacggtttacagcattgtctttaccgcgctcttcgctatccccctcggctttattttcctcggcgccgatcgtcaggattaagcgtcaacgggcgaaccgcggttcgccctgtcttatcggcttatcaacagcgtgaagcattagtcgtcgtcatgatagtgatgatggtggtggtggcgatgggggtgatatccatcgtcaataatgcatcccgataacagcgtgcacagcgcaataatcaacggtaacacgatcggttttttcatccttacttctcccgctattcttattccccggggccgagaatgccgcggcggataacgtgagtgtaaagggttaacttattgatgggataggataactccgcaatatcgccgcggcgatcaccaccagccaaactgggtgccggccaccgccacgatggcgacgaccagcatgataatggtgctttttttcattatgccccacccggcgccgcatagccgccgacaaaaaaccagccgagaaagacgacggcgatgataaagatcgccaccgggaaaagaatacccaatttcatgattgtgtccctgtgcccacgaatgatgccctgcatgatactggatatcgcggtactttagtcaatatgaatgaaattctcctggcggcgggacttcttatcctggtacatcgcctcatcggcagcgcgtaaggccgcttcaacatcgatactctgcggatcgcaggtgaccaccccgaagctggcgccctcatagtcgatacgctgttcgccgaggaagtaggcgccgcacagagcctgacgcagggacgtgacatacgcctgctgtgcggcaggctgctgggcgctaccgacgatcaaaaactcatcgccgccaaggcggccaacgatatcttcccggcgcgcgacagcggtgagtcgtttgccgacctgcaccagaaagctgtcgccgcacggatggccgaaccgatcgttaatggctttgaaaccatcgagatcgataaaaataagcgagacctgctgctgctgggcgcgggcggaggcaaagcgtaacgccagctgcttaaacagcgcgcggcgattgggaagctgggtgagctcatcggtagacgagtgcagctccagcgcgacgtttgccgcctgcagctgttgcaccagggtgtctttttccacgtagtgggaaatgagcttcgcaaacaggcccatgacctgttcgccttcgaggttataaggctgttgttgccggctggtggcgcagagggtgccgaacagagagccgtcggccaggcggacgggaatgcttaaaaaagtagcgattcccagctcctgggcggcgatgcaggagtgccagcggttggcaacgtcattgctaaacgtacactgatcctcaagggcgcgtttgcacagggattcatcccaggggacggaaaatccttccgggatctgcatttcgctgctgttgtgggcgaacatgatctgctgccgctgggcgttggtatcaatgcgggtgaggtaggtggactccattcgcgttaccgcctccagcatctccagcagctggcgcaccagggtttccagggactgttccgcagcgagggtttgcgacacccgggcaagaataaaatctgacatgaataatacagctccagcacgccaaacgtcaccccagcatattgggctgcaaacggacatcagcgtcaaataaacagtgatatttttaaatttatcacatctgtctggggaatacttgtccacgcggtgggaaaaaaagccccgtcgggggcgacggggaaaaactcattgattatggaatgatctgttctctggtcagttcgagaacagggctactctacgggggaaaagtgcaggcaagatggagaaaacgtggagattcaggctaaaatccccgggcattcaggaaagggaggaacaatgaaaaagctactggctattctgccactgttattagccggctgtgcccagccgcagcccactgcgccgacgaaaaccatcggcatgcccaaccccgcggcggtatactgtcagcaatccggcggcacccgggtgccggtgcaaacgccgcagggcgtcagcacccagtgcaaactacccagcggcgaaactctcgacgagtgggcgctgtggcgccgggatcatccggctaaatcgtaaccggcagggccgccagccaggcggccaacacccgggcatgattctgctcggtgttcttcgcggcgtacagcagcgtcagcggctggcgttgcgccagcgccgccagccgcaggcccgtttcgcgatgggcgtcgagctcctgacgatagcgctggctgaagtgggcgaaatcgatcgcctcgccgtgaaaggctttgcgcagctcagcggaaggcgttaactccttacaccactcatcacaggccagcgcctcttttttaatcccccgcggccagagacggtcgaccagcacccgatagccgtcgctgctttcctgcgggtcatacacccgtttacactgaatcatcatcctgctccttctgtgccatccaggcgagcaactgcgggatttgcccgtcggaaaataccgtgatgccgtgggcgcggagtaggtcggcggccacgccggcgcccgctttgcgccgtccgcgaaaggaaccgtcatagacatactggctgccgcaggtagggctgccgtcggtgagtaacgctgcctgacagcccgcttcccgggcggcgctgagcgccagccaggcggccagctgataatgtccggtgacgtcgcggccgtcgctttccacgatccgcgcccgtccggcaagcacatcgccgcccgtgccgccgaggatctccgccggcagtcggggcgtaggcagaccggccgccagctccgggcagtggatcaccagccgccccgcctgctgccagcgggacagcgtcgccgccagctgtgccttctcactaccgttataccgcacctggaatcccatcaggcaggcgctgaccaaaagcttatttttcattctctctcccttacgcgctttttccagtatacctcacccgtcggccacggcggtggggtgaaaataaggattgtgttccacaggtgggatcgctattctgacgtgccttgtgctgtccgtctcgtccagacataaggaacctgctatgaaaactcctttacgcctcgcccttgtcggcgattatcaccccgatattgttgcccatcaggccattcccctggcgatagacgatgccgccgccgtgctggagcagccggtgaaatatgactggctcgccaccccgtcgatcgcctccggcgaggcgctggcggagtacgatgccatctgggtcgttcccggcagcccgtatcgacacccggaaggcgcgtttaccgcgatccgctatgcccgggaaaacagcattcctttcctcggcacctgcggcggctttcagcacgcggtgattgaatacgcccgcaacgtgctcggctggcaggacgccggacatgcggaaaccgacagcgaagggcggatggtgatcgctcccctcagctgctcgctggtggagacctctgccgtcgtcgagctgcgggcgaatacgctgattgcccgcgcctatggccgggagagcattgaagagggctaccactgccggtacggcgtgagcagcgcgtttgcggcggagctggagcagggcgatctgcgcgtcaccggctgggatgaagagggtgagatccgcgccgtcgagctggtgacgcacccgttttttgtcgccaccttgttccagcatgagcgtcacgcgctggacgggcgtcccgcgccgctggtgcaggcgtttctccgcgccgcggcacaataattccaccggcagcgggcgctgccggtcatcttcaggggtgaatttcccggtcacgtccggcgagcgcgccgcagaccgccatcaccagcgaaatcagcgccaccgccagcagcggaatatgccagtcgccattggcatcatggatcctgcccatcagcggcggcccgcaggcggccagcagatagccgacgctctgcgccatccctgacagcgccgcggcctgatgcgccgagctggcgcgcaggccgataaacgtcaggccgaggatcatggtggctccggagccaaagccgaacagcagcgtccagccgatcgccagctcaggcaacagccacagcccggcggcgctgatggcgcacatcagggcgaccagcaccgcgatcccgcgctggtcgcgcagccgatgcaggatcagcggtatcgccaggccgggcgcggcggtcgccagctgcagcaggccatgcagcgagccggcctgcgcttcgctatagcccatactctgcagaatcgacggcagccagccgataatcacgtaatagaccagcgagttgatgccgaggaacagcgtcacctgccaggccagcgccgaccgccagatcccccggttatgcatagcgcctgagccggtcaatggcgtctccgcccggcgccgggactgcggcagccagctgaggagcgccagtagcgggaagaccatcagcagcagcagcgccccgcgccagccgaatccggccatcgccacggggaccaccagcgccgaaccaagcgccgccgcgccgcccatcgtcagggaataggcgccggtcatccgcgcgacatgttgcgagaaatcccgtttaatcagcccgggcagcagcacgttacccagcgcaatgccgcagccgattaccgccgtgccgataaacagcagcgcagcggagggcagggagcgcagggcaatgccggcgcagatcagcagcatcgccagcagcaggctgcgttccatgccgaaccggcgggcaacccctgccgccagcggcgagacaaggccaaaggccagcagcggcagggtagtgagcagcccggtctgcgcggtggtcaggccatagtcgctacgaatcgcgtccagcagcggcgccgcgccggtaaagaccacgcgcagggtggtggcgatgagcaggataccggcaatcagcagcgcggggcggcggccggtagaggagatcacagaagacatatcattctcaaagtaactaacgaggggggttacgatagcggctttgtccctcgtttaaatcaagctaaaatgacagattatcgctaatatcggacaatatgatgattggactggggctggatggctatgaaccggacagtggccacgaatcggccattgcctttcgtatccgggtggtggaggcggagcagtatattccggcgcattcccaccgtaaggggcagctgatccttgccctgcacggcgccttgacctgcgaggtggagaacgcaatgtggatggtgccgccgcagtatgcggtgtgggttccggggcagctgtcccacagtaaccgcgctacccccggcgcccaggtatgcttcctgttcatcgagccgggcgccgcgccgatgccggatcgctgctgtacgctaaagatttccccgctggtgcgagagctgatccttactctggcggagcgcggcggagagtccctggccgcccccgccacggcccggctggtgcaggttctgtttgatgagctgccccgccagccgcaggagcacctgcagctgccggtatcaaaccacccgaaaattcgtcaaatggtgacgatgatggctgaggatccggcgcgctggcagaccctgagccagtgggcggcggtgtttgcgatgagcgagcggaatctggcccgcctggtagtgcgcgaaacggggctgagctttcgccgctggcgccatcagctgcagctgatcctcgcgctgcagctgctgatccgcgggcagacggtgcagcagacggctcaggcgctgggctacgattccaccaccgccttcatcaccatgtttaaaaaagggctcgggcagacaccgggccgctatcacggtagcctggctacgacttcccaataaacaatgagatgatcccggcggcaatcagcggcccgaccgggacgccgcgaaacagggcgacgccgagtactgtaccgaccagcagcccggccaccagatgcggctgggagcccatcagggagacgccgcgcccgccgagccacgaaacaaacaccccgaccgcaatcgccagcagcgatttccagttcataaaggagtggatcagcgtcgagggcggcagcgtgccgctggcgataggcgccatcacgccgatggtcagaataatgatcccgacggtcagtccctgtttctcaacccagggaaagaaggcgttcagcggcgtgacgcgcacgataatcagcacgaggatggagatcgccacggtggtgttatgactgataaagccgagcgccgccagacccagcaggatcaacagggtggtatcaaacatgtacagaggtccttgccaaaataagaatgccaaaaatatcccgcttactctacgcatcgtggcgtgaataaacaggatttttacgccatgcggcggaaatctgggcggatgcccggttagctaagacggcgaaaggtcgcgatctctggtcgggcgatatgtaaatagtcttcggtgtcgagaatgatcgaccggtccaggcgcccggcgttaaaggcgatttgtggaaagcgttcaaacagcagcgggtccgccaccagccgcagcgccggatggaaactgaaggggggaatggcgccgaacacgcaggcggtgagggcatccacctccgccgggctggccagcgaggctttgctgccgccgatatgccgggccaggctggcgaggtcggcctgccgatcggcggcgaggatcgccagcacatgctggttgacgccgtttcctttcactttacagactaacgctttcgcgccctggccaagcgcggtgccgcggattgccgagacggcttcgcactgaccgaccgcctcgtgcgccatcacccggtagcgggcccggtgctcgtcgagcagcgcgcacagccgctggtggatattaccttctactgcttcaagcatagcgtcctcctgacatcataaagcagccagcttagcgctgttgcgccggcctgccaacggtgggccgggaaattcaccattcgctcattattacttcacagtgctgtggtgcaatcccgcaggcgcagatgagttttgtaaataaaaaaaaraatgattttcattttcaatcgaactttttttatttcgctcagtctctatcggacgacacagaatattaataattgccgtaatgaggttaggatgatgcacgatgcaaccatgcagggttccccacgcaagaaatttaataaaataagggagctcaacagacggcggaattactttactaagaaagtacgtaatgccctgcgggtgggggtggcgaaagcgctctgggatcgccgacgccgtcagccggtagatttgtcgtctgcgaaaaccgtcctgttgatgcgcaatgagggggcggtcggcgatgtagtggtggattccgcgctggtgaaatgcctgcatcagtcaggctatatcgttgattttttgctgacgacctctaacagccaggtgatgcgttataacccgcggatccgccatatttatgaagctgacccggtcacgtccgctgattttttgcgtaaatttaatcataacgttcctcgcgacgttattaatgaactggctaataataagtacgatattattattgacccttcgctgttcgatattcccgtgcatcgcctgcggcttttccgacaaataaaagccaaatcagtgctcgggtttaataaatggccatcgattaagcactactcccactcttttgattttgactgccagcgctggcacgtgacgaaaacgttcgagctgatcgccgattatctccaactggacacccgcgggctggacgcttacgacctggcggtgcccgggccgattatgcaggaggtggcgcagtatctggcgtcgctaagcggaaaagcggtggtgattaatatttttgccggccatgccgaccgcagtctctcgcagacgcagctggcggaactgctcgacaaactgctggcccgccacccggggagcgcggttattctgctcgatcaccggcgcgagatccgcatcccgctgccgccggaggtggtgataaacccatttaacacgttacaccatgcgatggcgctgatcgcccaggcggagctgattatctccccggacacctcggtggtgcacatggcggcggcgtggaacaaaccgctgatcgcggtctataaggacgttctgcttaataaccggctgtgggccccgggctatgacaacgccaggcagatcattgttaaatgcgggaaggtccatcagcatcgcgggctagtggatagaattatagcggcgctaccggagacgctgtgaggcgatgaggggagacaggtagggctcacctgctggccgtatgcaagagccagcaggtgagcgaaggttgcattgccagtctgcaaccgccgctattgtactgttgcccgcggctctgccacatccgggaaagctcttaaagaggtggtcgccgcgactgacgggcgggatcactcttcagtgagccacatatccgcctcttcaaacatctcctgcaccgtgcggctgatcagctctttttcatgcttgctggcgtcggtgttgatcgccggcagcgtcatcatcggcttcacccgcacttccgcctccgggaaaatgcgctgcatgcgtttggtcagctcgttaagaatggcctctctggcgcccggcagcccggcaaaattgcgcttgtcataaatcagttccacaaacatcttctgtcctctgtatgctgatcgcgggcgatagttttactgtattaatgtacagtgtcaagcgaatgccgcggcgctgcgtatctaccacctcgcgcggcgggcgggctgcgcgcaaaagcagcaaacggttcgctggcgctgaagaagacccctattgacatcaaggagttatttcagtgctggcgattgatagctggagccgatattgaccggtaaaactggcaaaactactgtatatatattcagtattgtgtggtgggttgaaaaatgaacgtttacacgccggttgagctacgtcagattgtctcctttcccttttttgccgacctggtgcagtgcggctttcccagcccggctcaggactatgttgagaagcgaatcgacctcaacgagctgctggtgcagcatcccagcgcgacctattttgtcaaagccgctggcgacagcatgatcgatgccggcattgacgaaggcgatttgctggtggtggacagcgcgcgtaaagcggagcatggcgatatcgtgattgccgccgtcggcggcgagtttacggtaaagaagctgcagcttctgccgcgggtgcagcttaacccgatgaacccggcctattcgcccatcgtggtcggccgcgaggagacgctcgatattttcggcgtcgtaacctacatcatcaaggcggcgggctgatcatgttcgcgcattgtgatgtgaacgccttctatgccagctgtcagaccgccttccggccagacctgaaggggcggccggtggtggtgctgtcgaacaacgacggctgcgtgatcgcccgctcggcggaggcgaagccgtttgtgaaaatgggcgaaccctactttaagcagaaggctgcgtttcttcgccacggcgtcgtggcgtttagcagtaattatgagctgtatgccgacatgtccagccgggtgatggccaccctggaagagctcaccccgcgctgcgaaatttacagtatcgatgaggccttttgcgatgtcagcggtgtgcgtcattgtagagatctgaccgattttggccgcgaaatccgcgccacggtgctgcagcgtacccatctgacgctgggcgttggcatcgccccgaccaaaaccctggcgaagctggccaaccacgcggcgaagcagtggccgcggcagacgggcggggtagtggacttgtcctgcccgcagcggcagcgaaagctgatggcgctgctgccggtgagcgaggtctggggcatcgggcggcggatcggcaaaaagcttgaagcgatggggatcggcacggtactccagctggcggagagcgatatccgctttatccgcaagcacttcacggtggtgctcgaacgaacggtacgggagctgcgcggcgagccttgcctggcgctggaggagtttgcccccgctaagcaggaaattatctgcagccgttcgttcggggatcggattacggcctatgaggatatgcgccaggcgatctgcagctatgccgcgcgggcagcagaaaagctgcgcggtgagcatcagtactgccggttcgtctccgcctttgtcaaaaccagccccttcgcgctgaatgaaccctattacggcaacagcgcctcgctaaagctgctgacgccgacccaggactcccgagatattatcgccgcggcgacgagctgtctggatgccatctggaaagcggggcatcgctatcagaaggccggcgtgatgctcggcgatttctacagccagggcgtcgcccagctgaatctgttcgacgagcttgctccgcggcacaacagcgccagactgatgcaggttctcgatcagctgaatgcgaaaaacggcaggggggcgctctattttgccggccaggggatccagcagcagtggcagatgaagcgagagatgctctcgccgcgctacaccacgcgatacggcgacctgctccgcgtcagataacgcgcgctatccctgcaccgcggccggaaaaaccgccgccagccagtcaataaagacgcggagccggggcgggacgtgccggtgccgggcatagacaacgtgaaaaggatagggggccgggcgccaggcgctgaggatctccaccagttcgccgctcgccagcgccggtttcagcgaataggtaaaggtctgcacaatgcctaagccggcctcgccggcggcaatatgcgcgttgctctcattgatgccgagatggggctctgtcttcagctcggtgctgacgccgtgacgcgtaaagcgaaacggaaacgctctgccgctggccggcgacagatagctgatgagccggtggccatgatgtagttcatccggcgaggcgggggtgccgtagcgctgaagatagcccggggtggcgcaggtgaccagcgtcgcctcgccgattttacgggcgatcagcgtcgagtcttccatcggaccgccgcggatggcgcagtcaatattgccgctgatgaggtccgcgggtttatcggccacctgcaaatcgatatggatatccggccaggaggtcataaagtccgccagcagcgggatcagcacatcgcacgcggtcgacccgccgatggcgatccgtagatggcccttcggcttattgcgggcggtattgaacgacgcgtcgatctcttccaggtcttccagcagacagcgggctttttcatagtactcccgtccttccggcgtcacggtgatacgccgcgtagtgcgctgcaggagggaaaccccaagatgcgcctccagttgctgaatggttttgctgagggtggcgttgggcatattcagcgagtccgcggcgcgggtaaagctgccggcttcgacaacgcgggtgaaggctttgagagctgaaaaccggtccattattcgctttatcctggttactggaggtcattatccaccgaggggaagagtgtttttcagattaggccatttttccgcctcgccgggacgattacagtgctttccatacccggcggggcgcgttcgcgagcctggcctgtttatactctaaccaaggaaatgcaccatgagcaaaaaacttgcggataaagtggcgttagtcaccggcggcagcgccgggattggcctggcgtcggcgaaagcgctggcggagcagggcgcgaaggtgtacatcaccggccgccgtcaggaggagctggatgcggcggtaagattcatcgggcccgccgcccgcgggatccgcgccgacgccgccgtgttaagcgaccttgacgcggtatttgcgaccattgccgaagagtccggccggctggatgtgctgttcgccaatgccggcggcggagacatgctgccgctgagcgccatcaccgaagcgcacgtcgaccggattttcgccaccaacgtgcgcggggtggtgttcaccgtgcaaaaagcgctgccgctgctcgccgacggcgcctcggtgattttgaccggctctacggcggcggtaaaagggacggctaacttcagcatctatagcgccagtaaggccgcggtacgcagcctggcgcgctcctgggcgctggaggttagcgaccgcgggatccgcatcaatgtggtcagcccggggccggtacgtaccccgggtctgggagggctggtggcggaggcggaccgccagggcttgttcgatgctctggcggccggcgtaccactcgggcggctgggcgagccggaggagattggccggacggtggtatttttagcgtcggatgagtcgagctttattaacgccgcggagatctatgtcgacggcgggctggcgcaaatctaaacgcctgccgtcgccgcaccgatctgaccgggcagaggcgctttcagcagggcgatcagcagcgtactgcccaccatgatccccgccgccagccacaccattcccgacaggccagctgaggcgatcagctggccgccgacaaacgccccggtgccgatggcggcattaaaaatggccacataaatggctgacgccggctgggcgacagcgcccgcgctgcgcagcagccaggtctgtaagccgacgaacacaatcgcgatgccggcgccccacagggctaacagtagcccgctaaaacagaacggcagtggcgcaagacgggcggcgccaaggagcgccagcgcgcccccgctcagcagcagcgcagcgaaaatcagccccttcagatgacgatcgataagcttacccgcgataacgttacccagcagcccggaaacccctgacagcagcagcaggccggagagggcggtcgccgggactccctgcagatttatcagcagcggttcaatgtaggtgaaggcggcaaagtgagcggtaatgatgcaggccgtggcgccatacaggccaccgagcagcggattgcggaagatatcgcgataaacacgcagcctgacgggggcaggggcggccagcgggggcagcgtcgagcacagcaccgcagcggcggctagtgacagcaaggccatcgacataaacgcgagtcgccagcccgccagggtggcgataaagctcgccagcggcacccccactacgcttgccgctgacacgccgccaaaaatgatcgccgtggccagccccagccggtgcggcggcaccagctgcgcggcgacaatgccaattaaggcccagaaggcgccatgcgccagggcgccaatcatgcgggcgctcatcagggcgaacatcgaataagaccgggttgcggcgaggcaggaaagcgcgaggatcagcatcagcccgaccagcagcgccttgcgggaaatacgcgccggcattgcgccggaaagcagagccgccagggcgcctacccagccataggcggtgacggcgaggcccacgccggattccgtctggtgaaaatccgccgccagggcgctgagcatgcccaccggcgccagttcgctggtgacgatcgaaaaggcgcagatcccgagcgcaacgacggcaatccagacgcgcgcctgcgccgggtggaggggtaaagcaatctctttcatatcaggcgtatccttaggaaaggagcgttccgcgcggtgcacggacgttcaggtgaggagagagcaggcgatcggatggcctggttgtctccgtgagtggcgtgcagtatcatccctgcaaaattgataaaaaagagcagaaaacggagatccgttttccataaacggaaaagagatgacagcagaatttcattgggatgatgcgcgcatcttcctcgccatcgcccgggcgggaacgctgagcggcgccgccgacaagatgaacatggggattgccacggtctcccgccggctggatcggctggagcaggcgttgaacgttccgctcttcagccgccatcagagcggctaccgcctgaccgacgatggcgaagccctgctcgcgcgggcggaggcgctggaatacgctggcctggcgttcggcgaagcggcgcaactgcaggggcatgtcgccggggttgttcgcctggccacctcggataacctggccacgcattttattctgccctccctgaaagggctcctggaccattatcccgagctgcgggtggaggtgctgagcggcgtgcagccggtgaacctgcaccgtcgggatgccgatctggcgatccgcatggtcaagcctgaggccgggcatctgacgttaaagcggctggggacggtggggtttggcgtctatggcgccgccgactgtctggccggcgcggacggcctgtcgctgagcgaggcggactttgtggggtggccggaaactcaccagcacctgccggccgcccaatggatcacgcgcaccctgcgcggccggccgtgtaaagtcgaagccaatacgctcgtggcccaggtttccgcagtatccgcgggcctcggattgggcgtcctgccgcactttatggcgcgggccagcggcctgcagtgcctgcagccggagatcggcgcggatcagaccctctggctggtgatgcattctgacctggccggatccagacgcgtgcgggttctcgccgaccatctcatcgctctctttgcggaccatcaagatcggctggcgatgccctgaaggggcgcggcttgggcgtgtatcgataagactgcccgaggctgacgagccacgattttctccgcgccagctaacagtgatactcgccgcgcaatattcggcccaatgctgccccgcagtcgaaaatactgcagagtgagaggatatccccgtccggcaaaataattttgtgttgtggccagcgcggcattgttgcgctcccccagaaatgcctgtcgatgttagggtgagacgtttatcaccacaggagaacgcaaatgattgtcaggacctggcacggctgtgtgccattgcaacatgctgaggggtttgcccgccacctcgagcggaccggcgtagaacacgctcagagcatcgccggcaaccggggggcgctggtgcgccaggaaaaccagggcgaatgggcgcatttctttcttgccacctactggcaggatctcgcggcggtcaaagccttcgctggcgaagactatcacgtcgcggtcacctatccggacgacgaagcattcgaactcctctccgacccctatgtgtttcagcatgaagtcgaggccgtgtcgccgctgtaggctgatgaccgggcaggtggaagattggccagcagcaggcggttgctggccgcgtgagagcgacgtctaccttgtatgggcagccagccgccgctgggtgaacgtggcatgatgggaacactcagcgcgtgagggccgcgacaatggaggcttccattttctccggcgtcgtgaacggcgcaaaacgcgtgaggggtgtgccgtcgcgaccgatgaggaacttggtgaaattccacttgatccgtccgccgagcacgccgggcaacgcttgtttcagataacgaaacagcgggtgtgcggcggggccgttgacgtccactttctcaagcatcgggaagctcacgccgtagttaacgtgacaagtctgctcgatttcatccgcaccgccgggttcctgcttaccaaactggttgcacgggaaaccaagcactaccagcccctgagccgcgtactttttgtagagcgcttccaggccagcgtattgcggtgtgaagccacaatggctggccgtattcaccaccagaaccaccttgccagcatagtcagccatggcgaggggctggccgcgcaggcgggtagccgtcaattgataaaaaggggtcatagcaggctcctgagagtagaaacagttcaacgctgacgatcgcgcgaatgtttgaagcagattaggcagttatgatacacagggttagggatttgtacctggagtgttaaaaaacgccagatgtcatagagaaaatcgcgaacaggaacggctgaaaataatgaaatatgtcttatcgctggtggtggtggcgatactcgcaggatgtaccagcacgccaaacttgccgcctcgggataccattgtggcgatgaaacccacagagtccggtattgtcgccagctcagcgaaatacagttactgctttgtccgtgacggtgtgcctcaggaatatcagcgttataagaccttttatgaacgctttcaccaacaggcttccggcgtgcgggttaactttgtcgtggaacaacatgaggtgacggcggaatatctggtggtgatggatcagcgcaaactggatgccgggcagcatagcgagctggtgaatcagtatcatgcggtgcaaattgataacgatcgcctcggggtgttgtttaaagcgacaggattttggactgcatcggacgcgtcagatctggccgccgcctaccagttagcgcaccccgttgtggtatcaatcaatgataagaccaaaacgattagctcgcttggcgccgttgccctggccccgttgtttccgttttacatgatgtatggatgtgccaccgggccttgtgtctgaggaaaacagccagcaagtcactcgactcactggctgagtatttaattaagcttcacttttagatgactgcttgtgaaacagttcgcggaataccgggtagatatcctcctggtcgcgaatatgctgcatggcgaaattatcaaaggtcgcctgcaggtgttcatactcgcgccacagggtctgatgcgcccggcgggtaatttcgatatagctgtaataacgcaccaccggcagaattttcttcgccagcagttcgtggcacagcggggagtcatcggcccagttgtcgccatccgacgcctgggcggcgtagatgttccactgcgccgggtcatagcgggcctgcaccacttcatccatcagcttcagggcgctggagacaatggtgccgccggtttcctgagaatagaagaattcgtgctcatccacctcttttgcctgggtatggtggcggatatagaccacgtcgacgtttttataagtccggctgaggaacagatacagcaggatataaaagcgcttggccatgtctttggtggcctggtccatcgagcctgagacgtccatcagacagaacatcaccgcctggctggaaggctccggccgtttttcgtaatttttgtagcgtaagtcaaaggtgtcgataaacggcacccgctctattttagcccgcagttcggcaatctctttgcgcaggcgctcctcctccagcagctgcaccggttcgctgcggctgatggcttccagatcctcctccagggcgcgcagttcacgacgcttgccggcggtcatcgccgtacggcgggccagcgagttctgcagtgaacgtaccacgctgatgttggctggcaccccattggaggtaaaacccgcgcgatgggttttaaactcattcagctgccggtgctggtttttcttcaggttcggcagggccagatcttcaaataacagatccaggtattcatctttcgagatctggaagacaaactcatcctttccttcaccatcggcgctggcttgcccctgaccgctaccgccgccgccgccaccgccctgcgggcgctcaatgcggtcgttttgcacaaaatggtcgttgcccgggtggacgcggttgcgcaggccgccgcgaccctgatgaaacatcggctcgttgatatcgtccgtcgggatcgagacggattctccgctctcaatatcggtcaccgagcgcttgttgatggcctcggagatcgactgtttaatctgcgccttataacggcgcaaaaagcgctggcggttgacggcgcttttgtttttcccgttcaggcgtcggtctatgaaccaggtcatatgccctcctgtactgcattagccaactttacttatcatcattcagctgcagttgacccggcggcgtgccgccgggttggacgcatcaggacgatttacgaacccgcaggtaccactcgcacagcaggcgaacctgtttgcgggtgtagcctttctccatcatgcggtcgacaaagtcgtcgtgttttttctgctcatcggttgaagttttggcattaaacgaaatgaccggcaacagctcttcggtattggagaacattttcttctcaataaccgtgcgcagtttctcatagctggtccagttcggattacgtccgctgttgttggctctggcgcgcagcacaaagttgacgatttcgttacggaagtctttcgggttgctaatcccggctggcttctcaattttctccagctcggcattcaacgattcacggtcaaacagctgcccggtgtccggatcgcggtattcctgatcctggatccagaagtcagcgtaggtgacatagcgatcgaaaatgttctgtccatactcggagtaggattccagataagcggtctggatctctttgccgataaactcggcgtatttcgggatcagatagcctttgaggaattccagatagcgctcggcctgctcctgtgggaactgttcgcgctcaatctgctgctccagcacatagaacagatgcaccgggttagcggccacctcgacgtggtcgaagttaaatacccgagacaggatcttaaaggcaaagcgggtggagagcccgttcatcccttcatcaaccccggcgtaatcgcgatactcctgataggacttcgctttcgggtcggtatctttcagactttcgccgtcatagacccgcatcttcgagtagatgctcgagttctccggctctttcaggcgcgacagaatcgaaaagcgcgccagggtttccagggtgcccggggcgcagggcgcatgggtcagctcactgttgttgagcagtttttcatagatgcggatctcttcggagatacgcaggcaataaggcaccttgacgatatagacgcggtcgaggaaggcctcattgttcttgttattacggaaggtcacccattccgattcgttggagtgagcaaggatgatcccgttaaacggcagggcggagatcccttcggtgccgttatagttaccttcctgggtggcggtcagcagcggatgcagcaccttaatcggcgctttaaacatctcgacgaactccataatcccctggttggcgcggcacagcgcaccggagtagccgtaggcgtccgggtcgttctgcgcatagtgttccagcttacggatatccaccttaccgaccagcgctgaaatatcctggttgttttcatcacccggttcggttttggcgatggcaacctgctcgagaatcgatggccagactttaaccacgcggaatttagtgatatcgccgccaaactcgtgcaggcgcttggccgcccacggcgacataatggtgccgagatagcgggtcgggatgccatactctttctggaggatctgcgcatcttcctgcggattgaacaggcacagcgggtgatcgttgaccggactgcgttcgccgttggcgctcagcacatagatgggcacgcgctgcatcagcgctttcagccgttcagccagcgacgatttaccaccgcccaccggccccagcagatagaggatctgtttcttctcttccagcccctgggcggcatgcttgaggtaggaaacgatctgctcaatggcgtcttccataccgtaaaactcttcaaatgccggatagcgtgcgataacccggtttgaaaagagacgggatagccgcggctcgagagccgtatcaaccatgacgggttcaccaatggccatcaacagacgttctgccgcattggcataggcactgcgatcttgccggcagatggtaagaaactcctgcagtgtgaactcttcgtccttggcagcttcgtagcgctggcgatagtgatcgaatatattcatggcatgccgtcctttcgttttttagcacaggttgagagccgttcatatgaatagtgggggcccccggaagacataagctgaacatcgctctcctggtatccagcaacccttatgccaggttgcgggtggggtagcgtgaatgtgcccggcaattacaccttctaaatttaagcgtagatgcatttagaaatcttgcatggcgcagaaaatcaatttcaatgacatatcaataactcatcctgaacatgacgctttttgattcgttgggacgcaaagttgtcatcgggctgtcaccggatggtaagagaagggtggcaaagtgaacgatttgtgtcatatcgggtaaagaatttgaggcatgagacctacgacggtacactgcacgggctgattatttgacaacgggaatatggattgtgactaaaatcaaacttctggcactcggcgtgctgatagcgacgtccgccagcgcggcgcatgccgacgggaagttcactcttggggctggcgtaggggtcgttgagcatccgtataagcaatacgatgcggatgtctatccggtgccggtcattagttatgagagcgaaaacttctggttccacggtctgggcgggggttactacctgtggaatgacaccaacgataaactgtcgattacggcctactggtcgccaatgtacttcaagccgggcgacagcgacagcgagcagatgcgtcgactggataaacgtaaatcgaccgtgatggccggtctttcttatgtccacaacacgccctatggcttcctgcgcacgacgattgccggcgatacgctggataacagcaacggtattaactgggatctcgcctggctgtaccgttacaccaacggtaacctgacgctgacgccgggtattggcgtggagtggaacagcgacaatcagaacgaatactactatggtgtctcccggcacgagtcgcgccgcagcggcatgcgcagctatgacccggacagtagctggaacccatatctggaactgtcggctaactatcgcttcctcggtgactggagcgtttacggcgtggcgcgctacacgcgtctgtcggatgaaattaccgacagtccgatggtggataaatcctggagcggtctgatctccaccgggatcacctacaccttctgattgtgcattcttacagtgcgcttcatgcatcaaaacagggccttgcgccctgttttgctttatggtggtgcatacggttaaggaggagaagatggtgaaaaaaacagtacgcttcggcgagcaggaggcagtgccggccatcgggctgggcacctggtatatgggcgaacatgcggcgcagcgtcagcaggaagtggctgcactgcgtgcgggcatcgaccatggactgacggtgatcgatacggcggaaatgtacgccgacggcggggcggaggaagtggtgggccaggcgatccgcggtctgcgcgaccgggtagtgctggtctccaaagtctatccctggcatgccggcaaagcggcgatgcaccgcgcctgtgaaaacagcctgcgccggctgcagaccgactatctggacatgtatctcctgcactggcgcggggatatcccgctgcaggagacggttgaggcgatggagaagctggtggccgagggcaagatccgccgctggggcgtctctaatctggacaccgaggatatgcaggcgctgtggcggacggcggatggcgagcactgtgcaaccaaccaggtgctctaccatctcgcatcgcggggcattgaatacgatctcctgccctggtgccagcagcacagtctgccggtgatggcctactgcccgctggcgcaggcggggcgcttacgcgatggactttttcagcatagcgatatcattaatatggctaacgcgcgggggattacggtagcgcaactgctgctcgcttgggtgattcgtcatccgggagtgctggcgatcccgaaagcggccagtattgagcatgtggtgcagaatgccgcagcgctcgacatcgtccttagtggggaagagctcgcgcagctggaccgcctctatccgccgccgcagcgaaaaacccggctggatatggtttaacccatcgttcacggcaaagaaaaacaaaagccccgttaccaacggggcttttgctattagcgttttttcacgctgatggtttgcgccaggcgagagggcgtctcttcgctggctttctgcggctgggttacgcagcaggtttcgacgcaaacgaaggttttgtagccatcgtccggcatatcgcccatgctgacggacagcgccgggcccgggttccaggccaccacattgtgctgatgatgatgcaccacgtcgatagtgcggtttagcgcgtcgtcatggatcacgctgcagctgtcggcgttgagatagacgcgatcggtgcggtcagggaaggtctgcacgccgttgctcagaacgccttcttcggcattgttcactttatcgatatagcgctcgccaagaccgctcaccttcaccgccgcgatatcgccgacgttgaaatagctgtgcagggcagaggtggtctcgaattcaccgtgggcttccagctcgatttcacaggtcttgcccagcttaaagcgggcatagagggtgaactcgtgcggccagagcttcatggtttcagcgctgtgctggagcgcaaaggtcaacattacgccgctgtcgtcttcgtcatgaccttccagggtccatggcagattgcgggcaaagccgtgcgacggcagaccttgctgcgcagaaggaccaaaccagggccagcaaatcggcacgccgccgcgcagggcgacgccctgtttaaacggggtgttgttgctcagccacagaacttcttcttcaccggcgggtttccaggagagcaggtgcgccccctgcagcgccacagaggctttcacctgcggatggtcgatgacaatcagctccaggtcgtccagctggcgacgggagatcacgggagaaatggtttcattcaccgggagagcaaaaattttatttatcattgtgcaatcctatctctgcagacaaaaaaaagagcgaccgaagtcgctcttacagattactttttcatctcaacttatttggagatgtgggcaatcagatccagaactttgttggagtagccggtttcgttgtcgtaccaggaaaccagtttcacgaagttgtcgttcagtgcgatacccgctttagcatcgaacacggaagtgcaaacttcgccgttgaagtcggtagaaacaacgtcgtcttcggtgtaacccagaacgcctttcatagcgccttcagaagcggctttgatggctttcttgatttcttcgtaggacgccgctttttccagacgaacggtcaggtcaacaacagatacgttcggagtcggaacgcggaacgccataccggtcagtttgccgttcagttctggcagtactttacctactgctttagcagcgccggtagaggacgggatgatgttctgagctgcgccgcggccgccgcgccagtctttgtgagacgggccatcaacggttttctgagtagcggtggtagcgtggacggtggtcatcaggccttcaacgataccgaagttgtcgttgataactttagccagcggcgccaggcagttggtggtgcaggaagcgttggaaacgatgtcctggccagcgtaagcgtcgaagttagcgccgcgaacgaacatcggagtgttgtctttggacgggccagtcagaacgacttttttcgcgccagcggtgatgtgtttacgagcggtttcgtcggtcaggaagataccggttgcttcagcaacaacgtcaacaccaacttcgtcccacttcaggttagccgggtcacgttcagcggtaacacggatttttttaccgttaacgaccagatgaccgtctttcacttcaacggtaccgtcgaaacgaccgtgagtggagtcatacttcagcatgtaagccatgtactctgcgtctaacaggtcgttgattgcaacgatctcgatgtcagaacgtttctgagcagcacggaaaacaatgcgaccgatacggccaaaaccgttgatacctactttgatagtcatatattccaccagctatttgttagtgaataaaaggttgcctgtaaaattacaaaaaccttacgcagcgtcaagcggaatcgtgtcaatcattgcgacaaatcaatcctgagcagacctttgcgcgattgatttgcctcactttccctttgagcccaattccatatgggggctgcgcgcggaattttaaagggcatttaagataaaaacgtgatttaagtcacaattatctggctgcctgtgggcaccggataagtttagaacaaaagtgtacgcttcattgttaatgttttgttagaattggagcgaaagtagtccattgcaaagcgagatgtaagcccatggcgaataaacccaccccggaagagctgaaaaatggcttgagcgaaatgcagttttacgtgacgcagcatcatggcaccgaaccgcctttcaccggacggctgttgcacaacaagaaaaatggcgtgtaccactgcctggtgtgcgatgcgccgctgtttaactcccagactaaatacgactccggctgcggctggccgagcttctacgagccggtaagcgcggaggccattcgctatctgaccgacaattcgcacggcatgcagcgcattgagatccgttgcggaaactgtgatgcccatctcggccacgtgtttccggatggtccgcagccgaccggcgagcgctattgtgtcaactcggcatcgctgagcttcaccgatgagcaaaatggcgagcaaatcaagggttgaagaaacgattcagcaaattattccaggcggaggtgagcggaagatggatattgagcaaattatcgacagtatgacgccggaagtgtatcagcgtctggcgacggcggtagagctgggaaaatggccggatggcgtcgcgctgacgccggagcagaaggaaaatagcctgcagctggtgatgctctggcaggcacggtataacaccgacgcccagcacatgaccatcgacaccagcgggcagatggtaatgaagagcaaacagcagctgaaagaggattttggcatcgtgccgaagccgatcgccaccgttaaactgcaataaaccgccggccggcggtgagacgttccggcgtcgggtaaccgcgcgccggatggcgtcatgtcgaatgaccgcgtccggcggtcagccgcttcgcttactttttgttcatcatcgctttcagatcggcaaacgggttgtaggtggcctcgccgacgctcttttgcgcatcttctcctgccaccaccgtggagccatactgatcggcttcggtgtacttggaatgttcgtgatcgtgacagtacaggcacaacatctcccagttgctgccatcttccgggttattggagtggtcgtgatcgatgtggtgcaccgtcagctcgcgcagattggagtagacaaactcccgtgagcagcgtccgcacacccagggaaaaagcttgagcgccttttcgcggtaacccacttccagacgtgcgtaatttttggggatataggccatggccccctgcctcctgtcaaacggttaagctgcgccaacccctggcgcagcggataacaggcatcataacctatcccgggcggcgcgatatacctgcattgcaggcgatgctgcctgcgtcacgcctcctggtgccgacgatgcggcggaacagccatgattagtgtttgatccccagcgattccgccagctgacgggccagctgattctggtcatcggcgccatattcccagaacatggccccggcgaggcccttcgccttgatatagtccgccttaatggctaccgagcgcgggttctcataggagagggcgaacagcggcttgccctccgcggactgcaccgacagccacggaaccttcgcctcatcgtcccagtgctcggtaaaacgcttttgcggatcgttgagcagtttgcccacgatatcattgtatttcacgtaggtgtctttgctcaggtcatagcccagcgaggcaaacagcgcgatctgttgtggcccaaaatagggctgggtgaccggattgttttgcgcatccgctttcgtccagtcaatccccggctcgaccgcccgtttcggtacccggccataaaaaccaatcccgaggttcatctggctgggtttaagcccggcggccaggtaattgttgaccacaaaatcggcgctgtatttatccgctgcggcgaccgtcggccagtggctggagtcatacagattcgagttgaagtactgcgtgccgtaggccatgtcgtaggtcatcaggttgatgtagttcagcaccggggccaccgctttgacgtccacccagcttttcgggctctcggcattggcgcctacggcgatagtcaccagcttttgctcaccgactgcctcacgcagcgatttcagcagggcagtgaagttgtcgcggtcagccggctggctggccaccagtccccaggcgccgttgaccggaaactcccagtcgaggtcaatgccgtccagaccatattgctggatgattttctgcgcggaacgaataaagacggcgcgactttctgcggtcgccgccgcgccggagaaaccacgcgcgccccagccgccgaccgacagcaggactttgaggtccggattctgtttacgcagggcggggagcttttgcagatccgcctgcaccttcggcgacagccagatctcgtgcagatgagcaggatccttcagggccgcattggtctcgtctttttcatcgttatagataaggccaaacgagtagttgagatgagtgatctgccggacgtccagcttatcgatatcaccgcccggcccggcggtgacgtcgccgccgccgttaaaatagccgacggacatcagcggttgggcagagagcgcggaagcgcaaagcaagggcaaggctgccagcaagggcaaaagtttcatagtggttcctctttgacataaaaataaccacgccacggaaatggcgtggcgaaaaaacagccttgccagactagcagcaataacctgttgaaactgcgagagagttcaatttatggacaatagcgaggcggcagaagaagacccggcgcgggggnnnnnnnnnnnnnnnnnnnnnnnnggcctgagtttcccgccagtcgtcgagggtatagagcgtggcgcccgcggcggccatctccataaacgcctggctgctgtcccgcggctgcagatttacgccgcgacagccgtcggtgatgacgttgaccgcgtagcccagcgccagggcatccagcacggtgaacttaacgcagtaatcggtggcgaggccgagaacggtcagctccacgatcccctgaccacgcagccagccgtccagttcggttttctgccggtgaccgttgtcaaagaaagcgctatagctgtcgatgatccggttttgccctttgtggaacacagcggcgatcgcctgctgcttgagcagcggatgcagcgccgcgccttcgctgtgctgcacgcagtgatccggccagaaagtttgcgccaggccgtccagctcgccctcggtgtagggttccacctggtgctggctggcgaagctgccgtgatccgccggatgccagtcctggctggcgacgatgggctcgccgcgcgccaggctccagtcgataagcgcattggctacctcgacggtactgtcgccttcaggaaccgccagcgcgccgccggcgcaaaagtcgttctgcaaatcaaccagtaacagcgctcgatgtgccatacgtcctccttaagcctcgtcgggggtgagttcgccacgcagattttgctgcatcgccgcgcgaatggcgtcaacgtccagctgctggctaagcagatagtgtagcttggtcagcgtcgcttccaccgtcatatcgaaaccactgatgacccccgcctgggcgagggcgttgccggtggcatagccgcccatgttcacctttccggacatgcactgcgtcagattgaccaccacaataccgcgctggctggcttccgccagcacctgaataaactcgccattctgtggggcattgccgacgccataggagcggaggatcagcgctttcaccggttggcgcagaaaattacgcaccacgtcggcggagatgccggggtaaatcgtcaccacgccaatcggctgcggagtgatggggtgcacgataagatctccgctgccctgcggtgccggcggagtaccgagacggcgaatatggatcccggcctccagcagcggggcaaggtttggcgaggcgaaagcgtcgaagccgtcggcatgggctttggtggtgcggttgccgcggaacagtcgattgttgaagaacagcgccacttcgttaatcggatagttggcggcgacgtacagggcgttgagcaggttaatctgaccatcggaacgcagctcggccagcggaatttgtgaccctgtcacaatgaccggcttgccaaggttttccagcatgaacgacagcgccgaggcggtaaacgccatggtgtcagttccgtggaggatcacaaagccatcatactcctcataatggctgcggatatcgtcggcgatgtgctgccagtcctcgggggtcatatcggatgaatccatcagcggatggtattcatggatcgtgaagtccggcatctccggacgatggaactccggcatcagcgccagctgacgctgcagatggccggaaacgggtacatagccgtgttcagagcgctgcataccgatggtcccaccggtgtaggcaacgtaaatcgattttttttgcatagcatcgcttaggttggtcgtagacaggcgcagtataaagagacgcaggaaaaaatacagcgtcggtcgcgggctttgtggcagtgttggcaggagagggaaaaaggctgccccgggagacggggcagccgctgcgtattaacggatgttagcgcaggtcaggcagaaggcatagcgattctgcgggtcgttaaacgccgccagcttgtcgctctccgctttcaccgtctcggccgccgcggcgaccggcgcaggcagccaggcctgaatggccgccggcagcgaggcgcgtaccgagccggtcaggctatccagcaccatcgagaagaaggtcggctcttcctgatagtagttgaggtgccaggttttcagcttcgccagctcggcggctttggccaccgcgtcgtcgaagtcgccgaggctgtcgaccaggccgttggctttggcatcttccccggtccagacgtggccctgggcgatctggtcgattttctccggcgtgctcttacgggcgttagccaccagggtgataaagcgctgatagccattctcaatgctcaactgcatcagctgctgcacttccggcggcagcgctttggtgctggagacatccgccagcggcgacgtggcgacgccgtcggtgtggacgccaatcgacccgagggtattttccacggtgttgatcaccccaaagatgccaatggagccggtgagggtgcttgggttcgccacgatgtaatccgctggggtggagatccagtagccgccggacgccgccatgccgcccatcgagaccactaccggtttaccggcggctttggctgccgccagctcttcacgaatgatttccgaagcggttacgctgccgcccgggctgtttacgcgcagaacgatggccttaattttcggatcgaggcgcgcatcgcgaatttgcgctgcggtggtatcgccgccgacgttgcccggggtctcttcaccgtccatgatggcgccgttggcgaagattaccgcgatggcggaaccctggtcagacggcgtcttcacgttgtagtcgtaatagctgatcgcccggtaattgttatccgctttgctccagccaaactgtttggtcagcgccttttccacttccgtggaggtcgccagctcatccaccagcttattgtccagcgcatatttcgccgtatcgccgcccaccttacgcaggccatcgataatgccctgggcgcccgggaagagctgctgggcggtgatctggcggttggcggcaatggtgttgaggtagttctgccacagttcgccaatccagcggctatccgcttcgcgggcggcaggggacatatcatcgcggatgaatggctcgacggcggatttataggtgccgacgcggaagacatgggtggagaccttcagcttatccagcagcgatttgtaatatagcccgttggtagcgaagccgtgcaggtctacctcgccctgcggcgagagccagattttgttggcgaagctcgccaggtagtactggccctggctgtagctgctgccgacggcatacaccggtttgccgctatcgcggaattcgcgcagcgctttgccgatgtactgcatggatggctggtcgccaccgacgaagtttttcagatccagcacaataccggtgatattgcggtcatccttcgcctggcgaatggtctgcacgatatcgaacagggagttctcctgcagacggtccgagctggcgccaaacagctggcggccaatcacgccgagcttgctgctggcggatggtttatccaccaccacgccggtaatatccagcaacagcgcgccgcgcgcggcatgttcgctggtggtgctgctgaactggctccagatgccgatacacaccagcaccagcaccaggaagatcgcattgagggccagtttgcgaataaagttgagtatccgccacgtccatttaaaaaagctggcaatcagtcgccaaagggttcgcatgtcttctccctaacgttatctaaaaagggcaggccgcaggggccgccgcgtctggctatcctaaagagtgagccgtcggttgtcagcaggaatcaccgaccgcgctgtaacaaaatccttgtgcatgttaattttatgaaaaatgacatcacaggagttatacagatggatgctctcgatctactgcttaatcgccggagcgcttcccgcctggcggaacctgccccggcgggcgaacagctggaaaacattctgcgcgccgggctgcgcgccccggatcatggcaccctgcagccgtggcgcttctttattatcgccgatgacggccgcgagcgcttcagccagttgctggaaaaaggggccagagaggccggccaggatgagaagggaattgagaaagcccgcaatgcgccgttccgcgcgccgctgattattaccgtggtcgcgcgctgtgaagaccaccctaaggtgccgcgctgggagcaggagatgtccgctggctgcgcggtgatggcgatgcagatggcggccctggctcagggattcaacggtatctggcgcagcggagcattgaccgagagtccggtggtgcgggccgccttcgagtgccgcgaacaggataaaattgtcggcttcctctatctggggacgccgcagctaaaagcctcaaccaccattgccctgccggataccgcgccgtttgtgacgcgatactgagtccgcgtgtgttatgccgggtggcggctgcgccttacccggccaacgcatccgtctctgactgtctgtaggcccgcgcaagcgcagcgccgccgggcaaggacagcgggcacggagccgattttgtgccgggtggcggctgcgccttacccggcctacgttcgtacgacctgtcgttaatttattcacttttcttgctgaaactgccggtgctgacggcctcaaaatcgctgagacgttcccggcaggccggggcagcccgcatggatgcgggctgagggccgtgctttgcagggacgctgcctcggcccgacccgaagcctgcagggataagtcgaagggaccgcgcagcggcgattttgctggccggagcccgggggtacagggggcggcggcgactggccgccccctgtgcgctcccggcgccataagtgacataacgcagacgattaaccgggagcgcaaactacgctgaagccacagataacataaacaaccacactgcagtgcttccctcaccctggccctctcccggagggagagggaaccgtccggctggccgcgcaagcgcagcgccgccgggcgatggcagcaggctcggagccgcatctatgccgggtggcggctggcgcctgacccggcctacaacccctaccattcgaatcaatcgcggtttttgtagcccggacaagacgcgccaggcgccgcatccgggaatgcaacggcgatgacgttacttctgccttttcgcgaattcatctttggctttctgcaactgctgctggaaggccgggttggtgtgcagcgtagcgaccaccgcggagccgacgatgcgcgccgcatcgacatcgctctgccagtgatagccgcagatcacccggctctcgccgagctcatagccgcgcttcaaaatttcgttttgccgctgcgggttgatctccgccagcaccagggcggtggcccagccgatagaggtatgcccggacgggtaagagccgtttttcgccagcttgtcctgttcggtggtgttgcaggtggagacgccatagaacgcaaacgggcgaatgcgcatgtatttctctttcgcgctgcgggtcgccaggtcgccggcgtcttcaatcatattggtcagcagtttgtgaagctgcggcgcgtctttctcggtgatcggcgaaccaaaggcgctggagaaggcgttggccacgccgcccgcgctgaggttggcatcctctgccgccagcttcccgcgctcggtattgcgcagcagacgtccttgctcatacatcgcctgatcgtttaaaaatgcgatactgcccaccgccggcggtggtggcaacagcgccaggctgtcgatggcctgggcattggtcagatagtagagatcgggcttggtggtgacatcgttcccggggggaaccagagcaaaggcgttaacggagaagaaactggccaggcaaagggcaagaacacgctttttcattagaatttccttacgtcataatcattccagagaagacagtcctgtgctgtcacatttctgtcatctttaagtaaaagtgaaaatggtcgggaaaaaattgtcgcgtctcgcaaaaacggctttttgtctgcttaatgagcagccatacgcgatttcagactgtcgtacttaccaccctggcgtttgggcgctaacatagcgggattgcaatgacaggagatgtccatgagcgagcaagccattcgtttaacgcaatacagccacggagccggttgtggttgtaaaatttccccgaaagtgctggaaactatcctgcatagcgagcaggcgaagtttgtcgatccaaacctgcttgtcggcaacgaaaccagcgatgatgccgccgtttacgatctcggtaatggcacctcgatcgtcagcaccaccgatttctttatgccgattgtcgataacccgttcgactttggccgcatcgccgccaccaacgccatcagcgatattttcgctatgggcgggaaaccgattatggcgattgccatcctcggctggccgatcaacaccctggcgccggaaatcgctcgcgaagtggtggagggcgggcgctttgcctgccagcaggcggggatcgcgctggcgggcggccactccattgacgccccggagccgatcttcggtctggcggtcaccggcgtggtgcccaccgagcgcatcaagaaaaacagcaccgcccaggcgggttgcaaactgtatcttactaaaccgctggggatcggcgtactgaccaccgcggagaaaaaatcgctgctcaagccagagcatcagggactggcgacggagaccatgtgccagatgaacctcgccggcgccgcgtttgccgccatcgacggggtgaaggcgatgaccgacgtcaccggctttggcctgctcggccacctcagcgaggtgtgccgcggggccggcgtgcaggcgcagctgcgctatgccgatatcccaaaactgccgggggtggaggactatatcgccgccggcgcggtgccgggcggcaccgggcgcaactttgccagctacggccatctcatgggcgagatgccgacggagtggcgggatctgctgtgcgatccgcagacctccggcggtctgctgctggcggtgaccccggaggcggaggcggaagttcaggccgccgcggcggagttcggcattaagctggccgccatcggcgagctggtgaccgcccgcggcgggcgacccatgatcgagatccgttgattcgatgcggttgtttattgcagaaaaaccgagtctcggtcgggctatcgccgatgtgttgcctaaaccgcaccgcaaaggcgatggctatattgagtgcggcaacgggcaggtggtcacctggtgtatcggccacctgctggagcaggcgcagccggacatctacgacagccgctatgcccggtggaatctcaacgatctgccgattgtgccggagaaatggcagctgcagccaaagccctcggtcaccaaacagctgaatgtcatcaagcgcctgctcggcgacgccgaggaggttatccacgccggcgacccggacagagaagggcagctgctggtggacgaagtactcgactacctgcagctggcgccggagaagcgtcagcaggtgcagcgctgtctgattaacgatctcaacccgcaggcggtggagcgggcgatcaaccgtctgcgcgccaacagcgagttcgtgccgctctgcgtgtcggcgctggcgcgggcccgcgccgactggctgtacggcatcaatatgacccgcgcctacaccctgctggggcgcaacgccggctatcagggggtgctctcggtggggcgggtgcagaccccggtacttggcctggtggtccgtcgcgatgaagagattgaaaatttcgtcgccaaagatttcttcgacgtgaaggcgcatatcgtcacgccgcaggaggagcgttttgtcgccacctgggtgccgagcgaagcctgcgaaccttaccaggatgaagaagggcgcctgctgcatcgtccgctggccgagcatgtggttaagcgcatcgaaggccagccggcaatcgtgaccggctataacgataagcgcgattccgaacccgcgccgctgccgttctcgctgtcggcgctgcagattgaggcggccaaacgtttcggcttcagcgcgcagaacgtgctggatatctgccagaagctgtacgaaacccacaaactcatcacctatccgcgttcggacagccgctatctgccggaagagcacttcgctggccgccatgcggtgttgaatgcgattgccgtctatgcggcggacctgctgccgcagccggtagtggatccggagatccgcaaccgctgctgggatgataaaaaggtcgacgcgcaccatgcgattatcccaaccgcccgcagcagccaggtgaagctcaccgataacgaagcgaaggtgtacaccctgatcgcccgccagtatctgatgcagttctgccctgacgcagtgttccgcaaatgccagattgatcttgagatcgccaacggcaagtttgtcgccaaggcgcgttttctggccgaggcgggctggcggacgctgcttggcagcaaagagcgcgatgaagagaacgacggcacgccgctgccggtggtggccaaaggcgatgaactgctgtgcgagaggggcgaggtggtggagcgtcagacccagccgccgcgccactttaccgacgccactctgctgtcggcgatgaccgggattgcccgcttcgtgcaggataaagatctgaagaagatcctccgcgccaccgacggcctcggcacggaagcgacccgcgcagggattatcgagctgctgttcaagcgtggtttcctgagcaaaaaggggcgctatatccactcttcggaggccggcagggcgctcattcattccctgccggagatggccgggcgaccggacatgaccgcccactgggagtcggtgttgacgcagatcagcgagaaacagtgccgctatcaggactttatgcagccgctggtggggacgctgtatcaactgatcgatcaggcgcgcagcacgccggtgcgtcagttccgcggcctggtggcgccgggcggggcgaagaagtcgttcagcaaaggtaaagggaagccgaaaggcaaaaaagcggcagacgataccgcgccgccgccgcagtaacccgccggtggtcgcgaggatgcgttaccccgcggccaccgcttctccgccagccaggccaatggtctacactaaacagccgggaagagcctggacgcggggcccctgagcaggggatgcccgctgcgcttttcctgaggccgatgccccatttctctcacaggcgataaggaggacccgtgaaatatattgctatcagccaaccgggcggcccggaggtattgcagatccgcgaaggggagatccccatcatcggggagcatgaggtgctcattgaggtgaaggcggcgggcgtcaaccggccggatattctgcagcgccagggtctgtatcccatgcctgagggcgtcacccccgtgcccggcctcgaggtggcgggcgtggttgttaaggtcggcgcgcaggtcacagcgtttacgcccggcgatcgcgtttgcgcgctgaccaacggcggcggctatgccgaatactgcgccgtgccggcaggccagacgttgccgatcccggcgggtctcagctttagcgaagcggccgccattccggaaaccttcttcaccgtctgggcgaatgtcttccagctgggtaagctgcagcctggcgaaagcattctggtccacggcggcgccagcgggattggcaccaccgcggtcctgctgtgccacgcgctggggatgaccgtctatgccaccgtcggccaggacgaaaaaattgctgcgctacgtccctatgctacggcgattaactacaaaaccgatgattttgccgagaaaatcggccagctgaccaacgatgaaggggtggacgtcattctggatattgttggcggcccttactttaaccgcaaccttgggctactgaaaaaggatggacgactggtcatcatcggctttatgggcgggcgaatcgctcatgaggttgatattcagactctgatgctcaagcgagccaccgtcaccggctcgaccatgcgcggccggacggcggcggagaaacagcagattgccgaggcgctgcgccgccacgtctggccgctgcttgaggcagggaaatgcaagccgctgatctacgccagctacccgatggcggagattgccgaggcccatgcctgtctggacagtggtcagcatctggggaaagtggtgatcacgatgacgtcgtgagacgcatcccggcgggctgccgccgggatggagttaggggaggttaaatcacgccctgggccagcatggcatctgcaaccttcacgaaaccggcgatattcgcgccgcgcacgtagttggtctgcttcgcttcgccgccgtactgcacgcaagcgtggtggatatccagcatgatgtgatgcagacgggcatccactttttccgctttccagcccatgcgcgcggcgttctgcgccatctccagaccggaagtcgccacgccgccggcgttggccgctttgcccggggcaaacagcacgccagcttccaggaacaggtcggttgcggcgatggtggtcggcatgttggcgccttccgccacggccttgacgccattggcaatcagctggcgggcggcatcgacgtccagttcgttctgggtcgcgcaaggcagggcaatatccaccggcactgaccacggctgctggccttcaagataggtgaggccaaattcgcgggcgtaatcggccacgcggccgtgggcacgctctttaatgtcgatcaggcgggccagtttttctttggtgaagcccgcttcgtcaacgacggtgccgttggagtcggaggccgtcaccacccgcgcgccaagctccatcgctttctcaatggcgtattgcgcgacgttgccggagccggagaccgccacgcgagcgccttcgaagccgaggccgtgacgtttgagcatcgcttcggtgaagtagatcaggccgtaaccagtggcttccggacggatcaagctgccgccaaaggagagtcctttaccggtgaagacgcaggcgctgttgttggagagcttgcgcatcattccggccataaagccgacttcgcgaccgccgacgccgatatcgcccgccggtacgtcggtatccgggccaaggtggcgatagagttcggtcatcagcgcctggcagaaacgcatcacttcgccatcgctcttgcctttaggatcgaaatcgctgccgcctttcccgccgcccatcggcagagtggtcagggcgtttttgaaggtctgctcgaagccaaggaatttgagaatcgacaggttaaccgacgggtgaaaacgcatcccgcctttatacgggccgatggccgagttgaactgcacgcgccacgcgcggttgacctggacctgattgcggtcgtccacccacaccacgcggaactggatcacgcgctccggttccaccagacgttccagcaaagcaagctgacgatagcgcggattttcctcaaggaaaggccacagggtggtcatcacctcccggacggcttgagcaaattcggtttgatgaggatcgcgctgttgaacgcgggtgagaaagccttccagagtgcacgtctgatccatagatatcagttccccttatggttgtggttgcatgtatttattatgattcggtccttgaaaaaaccgattttccgactataacaccgctaatccttaggcaagcaaggaaaaattgagccgacaacaaaatttataattgcccgctcgtcataactaaaagcgatgacgaggcggcgggcggatcagcggacggaaagggtggggcgctgggcgataaaggcgtgcagcagaggaatatcggccggggcgagatcgagggccagcgcttctgtgggaaggcaccagcgcagctgagtgtgatagtgggccagcggcgtgccctgaaagtgcggcacccaccaggcgtgcagatggacccggcggccggagacctcccgatgatggctagcgatatagcaagccgggcgggcgatgatgcccatctcctcctgcagttcgcgggccagcgcctgcggctggttttcacccggctccactttgccgccggcgaactcccacatccccggctggtcggcgtggggcggacgctgcgccagcagaatctggccatcctgttcaataatggcggcgacaacatcaatcatttttagcataagcattaaggttaataagacgaatatggcctattatcaccgccatagaccgtaactgacaaccgccaaccctgctggagaccttcgtgcttgatagccacctgcatccgcgccttaaacccctgcttaacgctgtcgccggcgcccttgaccgccccggcatctcaccggacgggctgacgctggttggttttgccatcggcgtgctggctctgccctttctggcgctggggtggtatggcgcggcgctggcggccattctccttaaccgcctgctggatggcctggacggcgctctggcgcggcggcgcgggctcacggacgcgggcggctttctcgatattgcgctggattttctcttttacgccctggtgccgttcggctttattctggcggatccgctgaacaatgccctggcgggcggctggctgctgtttgcctttatcggcaccggcagcagctttctcgcttttgccgccctggcggccaggcaccagatcgccaatcccggctacgcccataaatcgctgtactatctcgggggactgacggaggggacggagaccatcctgttgtttgtcctcggctgcctgtttccggcgcatttcgcctggctggcgtggctgtttggcgcgctgtgctggctgacgacggcgacgcgcatctgcagtggctaccagaccttaaagcgggtaacgaccacagcgtaaacggggtatcgcgcgtcgccgacaaagggcgacgcgctgaggcggggcgagttactgactgctttccgggccgcgctctccgcgggccaccggattgtgcgggttgctgctccattcgtaccagccgccgtcgtacaccgcgacgtgcggccagcccatggcgcgggcatacataaaggtttccgaggcccgccagccggtcccgcaatagaatgccacttgctggctcggcagaatgttccactggcgccacagggcagcgatatcgtcggcgctgcgcatggtgccgtccgggttatggaaatcctccatgtgcgtggagtcgctcccggcgtggccccagcgggccccagcgatgtcgcccttcggcttgatatagctgtagccgctggtggtgccgataaactccggccacgagcggacgctgaccagcgaggcgtcctgacgatgcagcagcccgcgggcttgttcggtatccagtatcagctgcggctggccggggatcggcgcgccgaaatcaggcgccggctgctgcgccggcggcataccgcgctctaccggcagcccggcgtcggaccaggtctgccagccgccgtcaagcaggcgcacgtctttgaccccggcgtacagcatgatctgcgccacccgcgctgcggcgtagacgtcgcgaccatagaggatcaccgtggtgtcatgccggatgccgtgcttcgccagcatcgccttcagctgcgcgtcggacactttattccacagcggttcgctctccacctcattggtatcgatatagcccgcgccagggatatggctcagcagatagagcttcggcgctccccaggcggcttcaaacactttccaatcgcctgccggggcggcggcgaccgctttcccttgctgtaggtcgtgcagccactgggggtagaccagctgttcaaagtgcggcagcttttgcagacggtcggtctggctcagcgcatcgctcagggtgctgagccgggtgaaacccgtttgtttcagccgcgccgcgacgctggcgttatcctccgggctgccgtacagcgcgatgggggtatcggactggagctggtgctgcttagcccaggcgcgcagctgatcgtcgctcatggcgccgagccagcaggcggaaagattgagggcctgcggctcatggccttccgggccgttggcgcgctgcggccagccgttgtaataagcgctcagccgggtgtcgatggccacgccgtgctgctgttgcaggtgggagagagtgagcgctggcatggtttcagcggcgcaggtagtggaagcagcaagccccatgagcagggcgagtgcggtcaattgagaaacacgtttcatcgaaatgcccgacggtaaaaagtggagggcgtattctccactcgccaggcgccgatttctttgcggtaacgcaggtttgcacactattgtccttcattgccagcgctccatcgccaggcagcgccccgtcggcgggcagtcctcgcgatcgtgggtcaccaggatcgccggaatggcctggcggtccagttcttcaaagacccagcggcggaacccggcgcgcaggctggcatccaggcggctgaagggctcatcaagcagtaatgcctcggggcgcgccagcagggcgcgcagcaggctcacccgcgcccgctgcccgccggagagcgtggccggatcgcgcggggcgaagcccgccagcccggcgcggctaagcgcttcctccaccgcggtttttcgcgcctcgccgcgcacgttctccggcagcgccagctgtaaattttgcccgacgctgaaatggtcgaacagtaacgggtcctgaaacagaatgccgatgcgccgatgctctgtcggcagcgtatcgcaacgccgttcgttgagccacagttcgcctcgggcgcgaaaatcgccggacagggcgccaatcatccaggcaaacagtgttgatttcccgctaccggaggggcccatcagcgtcagcacctcccccggggctaccgaaaaggcgacctcccgcagcagcggctggcgtctcacgctcagagtcagatggtttacggttagcactagcgaagtcctcgtcgatagcggcctgccagccaggccagcagagcggtcagggtaaagcataccgccggcagcaataattgccacagcgcctgagcggcgagcgtctgcgcctcgccgccgctgctgagcgccaccgcctggctggtgagcgtcggaattcggccagcccccagccatagcgttggcagatactgcgcgatgctcactgagaagcccaccgccagggcggtcagcagtgggcgagttagcgaaggcagggtcagcaaccagaaaatacgcgtcgatccccagccgagcgtgcgggcgacaaccgtcagccgcggatcgcgctggcgccaggccgggcgcaaaataaacagcatccagggcaccacccacagcagatggccccacaggacggtccaccagtcaccgtcaagccaggcatacagcgccaaccggtactggccgtcggccagcggcagggccggcaggaccagcggtagccagacccagccatcgcctcgcgccgggccgcaggccagccacagcaggcagacagccgcgccgagggcgcaggccgccagcgccagcccaaggctgttgcccagagcatccatctgcggcggcgccgagcgcgccagccccgccagcaatagcgcgcccagcagaccgctcagcggcagcagcgccgccagcaggcggccgggcagggcatgaggatgcgggtgacgaacaccgtgcagatcgggctggtactggcgctgtagccgccatccgccccaggcgaccagcgccagcccgccgaggatcgccatcagcagcaggctggccagcgcccctttggcctgctgcagctcatcgccctggcttaaccattgccacgccagcacggcgagggtgggcggattgccgggccccagcaccagggcgacgtctaccgccgacaggctccaggcggtggtggccagcagcaccatgccgagggcgggcagcagggcgggcagcaccagccaacgcaggcactgccagcggccgtagccgaggctcttcagggcggtcgcctggtcggcgaggcgtttctctcccagcaggccatagatcacccacagcacaaaggcgctctctttcagggccatcgtcaggccaagcccaatgccgtaccggtcgaccggcggcgtcagaaacggcaactgctgccagagccagcccccttcggcgaacagcagcagcgccgccgtcgccagggcgagatggggcaccgccagcagcagcggcagacgggaagccagccgccgccagcgggccgaaggccagagggcggcgacgatggtcagggcgatcagcagcgcgccgccgacggacaacagcgtggagacgagcgtggcggccagcgcctggcccagctgcgggtcggcgaacagcgcccgccagtgggccggggagcgcgcagcgcccaccagttccccggcggcggggagcagcggcagatagatcgccgccatcgccccccaggccagcaggatcagtgggtaccgtagcggcgcagccattcctgctccagcgcgtcaacccatgccgcgtgaggctcggcaagcaccggcggcagatcctgcggcagggctgccgccagcgcctggcgctggccgtcaggcagacgctgcggatccagtacgctcggatcgccccagacggcggcatcggccttgcgcaattgcgcctcaggggagagcaggaaattggccactactttggcgccagcgacagcgcgggcgttagccgggatggtaacgaaatggacgttgccgagggtccccacggtaaagccgaagctgtagctgtccgtcggtaattcgccgctggcggctttctgccgggcgtgcagcgggttaaacgtcagcgacaggcggagggtgccctggttgagcatggcgtccatccgcgccggcgacgccgggaaatccttgcccgcccgccacagggccgggtgcagcgcatcgagatagcgccacagcggggcggtgaccgccgcgaaggttgccggctgcggcggctggcgcagggcggctggctggtcggtgagcgcgatcagcagttgctccagcagggcggtaccggtgaagtccggcggccgcgggtaggttacgctgcccggatgggctctggcgaaggccagcagcgcctgcgggctggtgggcggctgcggcgtttgtccgcggcgggcgataaacgtcagctgggcgctgccccacggcgactccgcgccctcggtggcgactgaaaaatcttcccgtaccggcttttgcagatcgacatagcgccagttgggcagcgattcggcccagccggtgagcagcaggttggcctgtttaagcgtgcgaaagttttcgccgttgatccacagcagatccactgacccgccctggcgacgaccggcctgcgcctcggtctggatgcgtttcactgcgtcggcggcgtcggcgacaggcacaatacgcaggtcgattgcgtaatagcgtttgacctcttcgctgacccacgccagatagcgattgacggccggatcgccgccccaggcgttaaaccagacggtctgtccgcgagcttccgtctgaatctgccgccagctgtcgtcggcattaaccgccagcggccagagcagcagcaggcacagacagaggctgtaatcacgcaaacggcgcatcgttactccttattctgcgaggaagaggtgggtatctggcacaacccctgagccgggatcgccatcgcggcattgaaccgcgctgataaattttgcaggccgatcagggcggtcagctcggtgagcgcccgggcgtcaaaatgcgcggccatcgcgctacgcagggcatcatccaccgccggcggcgtctgggtggcggcttcggcataggccagcgccaggcgctctttttcgctgaacagcgtactgctgcgccagtcggcgaccgccagcagcttgtcctggctcccgctccgcgccgcgagggtcatgctggtgatatcgatacagaattcgcagtggcacagctgggcgatgcgggcgctgaccagcgagcgcagcaccggatccagcggcgagcggcggcgttcaatatagcccacgaacagcgaaaccaggtaaaacagccacgggatccgaccccaccagcgaatggggctcagcacctggccgtaatgccggcggtgcagccaggcctgcggacgaaggatcagggggacagaatccagcgggggtaagctcatggcgacgatctcttatgacgttcacggtaaatatttttggcgatagagatgaccaccgccagggcaaaaagcagcgaaagcccggtggccagccagaaggtgcccccggtgagcagactcccggcccaggaataaacgatagtcgccgggagctggcccacgccggtggccagcataaagggccagaagcgcagcgaggttagtccggcggcatagctgaccgggtcaaacgggacaaacggcagcaggcggcagaccaggatcgtctgcggcccaaagcgggtgaaatagccgtcggcactgcgcagcaccgcgcggccggtgagtttctccaccacttcgcgccccagcgctctggcgatgcagaagcagagcccggccccgaccatggcgctgaaccacgacagcgccccgccccagaaggcgccgaacagggcggcgttcgccagggtaatcaggaaagccggcagcggagcgacgatcgcctggaggatcatcagcgcaaatgagaccagcgcggcctgcggcccccaggcggcgataaaccctctgacctgctgcggatccagggaggctaatgccgtcagactctgctgcagaaaggtacgcccgccagggaaccacagccaggcggccagagcggcggcgaccacgacggcaagggccagccgggcgcggcgcaggtgacggcgatcaggttgggtcatggcgcacctcctcactgcacgccgccacgcgacgggcgcgggcaaaccgtttacctatctgcaccagggcaaacagcagcccgccggcgagactcagtttgagcgcgaaggcgagggttaccccctcgcgggccagttcgctggccattaccgaatagatgaccagacccggcagggtggtcacggccgagatcagggtaaagggccagaagcggatcgccgtcaggccgtaggcgtaattctgaatattgtagggaaagagcggcaccaggcgggtgaggatcaggaaatcgcagccgctgtgggcgataccgcgctcaatcgcctgaaagacggtggtatggcccacatagcgctgcagcagatcgcgtccaagccagcgggcgattaaaaacgacagcgaagaggcgagggtggcggcggtaaacgagagcagggagcctgttagcgggccgaagagcatcccgccggcgatcaccagcaggctgccggggatcagacacaggatggcaatgataaacagcgcagcatagaccagatatccccaggcgccctgatggcggagggtgtcctgaagcagatgcaggtgagtcagcagatcgtggagaccgacgcggtggctgataacagccagcgtggccaccagcgcgagaagtcccagccctttaccaatggccggatgacggcttcttttgcatgagaggtgctcctgtacagtctggacgcggtggacatcaaaaagtgcgcgcgacagtatcctgttccgacaacggtcacaatcctttaccgtcgctttgttgattttgctcaggaaattctgccccccgcacagcgggaggcgagagaagggcgtgaattatggccggaaggtggcccacaccggcgcgtggtcggacggtttttccatcccgcggatctcgtaatcgatcccggtttccacgcagcgctgcgccagaggctggctggccagcagcagatcgatgcgcagcccacggttatcgtcgaagcctttggagcggtaatcaaaccacgagaaatgctcatgattgtcggggttagcctgacgccaggtatccaccaggccccagcccagcaggcggtccatccattcccgttcttccggcaggaaggaacatttgccggtgcgcagccagcgtttgcggttctcttcaccgataccgatgtccagatcggtaggactgatgttcatatcgcccatgatcagcaccggattctctttgttgagttcggtctccagatagttctgcagattctgatagaacgccgctttggccgggaatttggtttcatgatcgcggctttcaccctgcgggaaatagccgttaatcactgtgacgttgccgaagggcgacgggatctccgccataatgatgcggcgctgagcctcttcgccatcgtccgggaaaccgcggcggacggcaatcggcgtctctttggtcagcagcgcgacgccataatggcctttctgcccgtgataaaagacgttatagccgagcctggcgacctcttcgagagggaacatgtcgtcgtgaactttggtttcctgcaggccaatcacgtccggctggtgtttttcgacgatggcggccagttggtgtgggcgggcacgcaggccgttgatattaaaagagacgaatttcatagtcgctgccactgtgcaaggtgaatagtgcagggatggtagcagaaattcgccaggctggctgccaccggatgcgtcattctgccaatcgctgcgcatgagcgtgccgtgggtgccccttttgcgggcatgccgcgccaaaaaagggcaaatagctacgataaatttcgcagaggatcacaattacagaattatatcttaccgttgcataatttatcttctttaatcactgtttatccccctttgtcggatacttattcactaaatatgcattttatgtgaatagcgttcggctgtaactcattgattccgcgttatctnnnnnnnnnnnnnnnnnnnnnnnnnnnnnnnnnnnnnnnnnnnnnnnnnacatttacagcgtaataactcatatttattaacattattgctacttttaatttaccggaagaggtcgatatgtctcagtcaattacgcgtaaccactttgatgaatggatgatgccggtctacgcgccagcggcgtttattccggtgcggggcgccgggtcacggctgtgggatcagcagggcaaagagtatatcgattttgccggcggcatcgccgtgaacgcgctggggcatgcccatccgcgtctggtgcaagccctgaccgaccaggccggcaagttctggcataccggcaacggctacaccaatgagccgatcctgcgtctggccaaaatgcttatcgatgctaccttcgccgaccgggtcttcttctgtaactccggcgccgaggccaatgaggcagcgctcaagctggcgcgtaaatatgcccacgatcgctttggcagcgagaaaagtggcatcgtcgcctttcagaacgctttccacgggcggacgctgttcaccgtctcggcgggcggtcagccggcctattcccgggatttcgccccgctgccgccgcagatccagcatgccgtatttaacgatctcgagtcggcaaaggccttaatcaatgagcagacctgcgcggtgatcgtcgagccggtgcagggcgaagggggcgtggtgccggccagcgtcgagtttttacgcggcctgcgtcagctttgcgaccagcacaacgccctgctgattttcgatgaagtgcagaccggggtcgggcgcaccggcgagctgtatgcctatatgcactacggcgtgacgcccgatgtgctgaccaccgccaaagcgctgggcggtggtttccctattggcgcgctgctggcgacagaggcctgcgccagcgtgatgaccgtcggcacccacggcaccacctacggcggtaacccgctggccggggcggtggccggcgaactgctgtcgatcgtcaacaccccggaagtgctctccggcgtcagacagcgccatcagtggttttgtgaacgcctgcaggcaattaacgcccgctatggcctgttcaaggagatccgcggcctgggactgctgctcggctgcgtgctaaacgacgcctgggccgggaaggcgaaaaccctcagtaacctggcggcggaagagggggtgatgattctgatcgccggcgccaacgtggtgcgtttcgcgccggcgctgaacgtcagtgaagaagaggtgaacagcgggctggatcgcgtcgagcgggcctgcgcgcgtttcgtggcaggagtctcatcatgatggttattcgaccggtggagccgggcgatttgcccgggctgctgaagctggcagcggagaccggcggcgggctgacctcgctgccggtggatgaagcgaccctcgcggcgcggatcgcccgctcgcagcagacctggcgcggcgagctaccgaaaagcgagcagggctatgtctttgtgctggaggagagcgaaagcggcgcggtggtgggcatctgcgcgatcgaggtggcggtggggctcaacgatccctggtataactaccgggtcggcacccaggtccatgcctcgaaggagctcaacgtctatcaggcgctgccgacgctgtttctcagcaacgatcataccggcagcagcgagctgtgcaccctgttcctcgacccgcagtggcgcaaagagggcaatggctatctgctgtcgaaatcacgcttcttatttatggccgcctttcgcgagcgcttcaatgagaaggtggtcgccgagatgcgcggggtgattgacgagcagggctactcgccgttctgggagagcctgggcaaacgctttttcgccatggagttttcccgtgccgactacctgtgcggcaccggacagaaggctttcattgccgccctgatgcccaagcatccgctgtatatcgatttcctttcccctgaggcacaggcggtgatcggcaaggttcatccgcagaccgccccggcccggacggtgctggagaaagaggggttccgctacctgaattacatcgatattttcgacggcggcccgactctggagtgcgacatcgaccgggtgcgggcgatccgcaaaagccgtctggtgaccaccgaggcaggtgaaacctcgcccggtgactggccgctgtgcctggtggcgaatgaacagtatcaccagttccgcgctctgctggtgcatgccgatccggatggcgacaccctgaccctcagcgcccgcgaactggatatgctgaagtgtcatgccggcgaccaggtgcgcatggtgcgcctgatccctgaggagaaaactgtatgagtctgtggattaacggcgagtggcggcccggccgtgggccaggtttcagtaaacaggatccggttaacctgaaggttgtctggcagggcgaggcggcggatgccgggcaggttgccgaggcggtggcggctgcccgccaggcgttcccgtcctgggcgcggctgccgtttgccgtccgtcaggcgatcgttgaaaagtttgccgctctgctggaagccagtaaggcggagctgacggcggttatcggcgccgagaccggaaagccgcgctgggaggcggccggggaagtgacggcgatgatcaacaaggtggcgatctcggtgaaggcctaccacgtccgcaccggcgaacagcacagcgacctgcccgacggcgccgccacgctgcgtcaccggccgcacggcgtactggcggtgtttggcccctataactttcccggccatctgccgaacgggcacatcgtgccggcgctgctggcgggcaataccgtggtctttaaacccagcgaactcaccccgcgcagcggcgaagcggtggtgaaactatggcagcaggccggcctgcccgccggggtgctcaacctggtgcagggcggtcgggaaaccggcgaggcgctcagcggccaggcggatatcgacggactgctgtttaccggcagctcaaccaccggttttcatctgcatcgccagctggccgggcaaccgcagaagatcctcgcgctggagatgggcggcaataacccgctgatcgtcgacgatccgcgggacgtggatgccgcggtgcatctgaccatccagtccgcctttattaccgctggccagcgctgcacctgcgcccggcgtctgctggtccgacgcggagaggcgggcgatgtcttcctctcccggctggtgacggtgagccaacggctgatcccggcagcgtgggacgccgagccgcagccgtttctcggcgggcttatctctgaacaagccgcgcagaaagtgcatcaggcctggctgcagcgggtcgccgctggcgcggtcaccctgctggagccgcggttattgcaggccgggacgtcgctgctaacgccggggattgtcgacatgcgcgacgtggccaatgtcgaggatgaagaggtgtttggcccgctgcttggggtctggcgctacgacactttcgaggaggcgattgccttagccaacgctacccgcttcggcctctcctgtgggttaatctccccggaacgggagaagttcgatcgactgctgcttgaggcgcgggcagggatagttaactggaacaaaccgctgaccggggcggcgagtaccgcgccgttcggcggcaccggggcgtccggtaaccatcgtccgggggcctggtatgccgccgattattgcgcctggccgatggccagccttgaatcgccgaccctgacgctgcccgccagcctgagcccgggtctcgactttctggccggggaggcgtcatgaccgcccgcgaagtcaactttgacggtctgcccgggctgacccatcactacgccgggctctcctttggcaatgaggcttccacccggcatcgctatcgggtgtctaacccgcagctggcggcaaagcaggggctgaaaaaaatgaaagccctcgccgacgctggctacccgcaggcggtgatcccgccgcaggagcgtcccaacgtgccgcttctgcgccagctgggctttagcggcagcgatgagcaggtggtggcctgggtggcgcagcaggagccggatctgctgtcggcggtgagttcggcctcggcgatgtgggtggcgaacgcggcgacggtgtgtccctccgccgattcgctggatggcctggtgcatctgacggtggcgaatctgcaggataaattccaccgcgccagcgaagcaccgactacagaggcgctgctgcaggcgattttccccgaccgcacgcgatttgctatccacccggcgctgcccgcctcggcctggtttggcgacgaaggggcggcgaaccataatcgtctcggcggcgagtatggtgctcccggcgtccagctctttgtctatggccgccgccgggggagcgaggaggcgccgcgtcgctatccggcgcggcaaacccttgaggccagccaggcggtagcgcgcctcaatcaggtcaatccccgccagctgatcttcgcccgccagcatccggcggcgatcgacacgggggtttttcataacgacgtcatcgcggtgagcaaccgtcaggtcctgttctgccatgagcaggcctttgccgaccagaccgcgcttctccagcagctggcgcagcgggtgccgggttttacgccgctggtggttcccgccagccgggtctcggtggcagaggcggttgccacctatctgttcaacagccagctggtgagccgggcggatggcagcatggcgcttatcctgcctcaggaagcgcaggagcatgccggcgtctgggaatacctcaatgagctgctggccggggataaccctatcgccgacctgcgggtgttcgatctgcgcgagagcatggccaacggcggcggtccggcgtgcctgcgcctgcgggtggtgttgacggccgaggagtatcaggcggtcaatccgcacgtcctgatgaacgatacgctgtttgccaccctcaatgactgggtggatcgctactatcgcgatcgtctcacccaggccgacctcgccgacccgcagctgctgcgggaagggcgcgacgcgctggatcggttgacccagatcctgcagctcggttcggtttatccatttcagcaataagggggcgcggtggaacattttctggcattaaccctggcggggcgtttgccccaccattttcacggcgagacggcccatttcctctggcactggctcggggaagggatccttgagctgacgccgcatgcgcgctgcgagcgcgggctggtactttcctgcgccattcatggcaacgaaacggcaccggtggagatagtcgaccacctggtgcagcgactggtccgggaggcgctcccgctgcgctggcggctgctggtgatcgtcggcaatccaccagcgctgcgggcgaataagcgctatctgcacagcgatatgaaccgcatgtttggcgagcgctggcggcagtttccgctcagtgaggagacgcagcgggcgcagcggctggagcaggcggtggcccgcttttatcgcgaccacgatggcccgcgctggcacctcgatctgcataccgcgatccgcgggtcgctacatccgcgcttcggcgtgctcccggcccgcgatacgccgtggcaggaggattttcttcactggctgggcggcgccgggctggaggcgctggtgtttcatcgccagcccggcgggaccttcacccacttcagctgcgaacggttcgcggcgctggcctgcacccttgagctgggcaaagcgctgccgttgggggaaaacgatctgacgcagtttgccgccgtccagcgggcgctctcccggctgctggtgggggatctggccattgccgacgccccagcgccgctgcgctaccgggtggtacagcagctaacccgccatagcgatgatttccgcttgcatatggcggatcagacgctgaacttcacccccttcgaacccggcacgctgctggcggaggagggcgagacgcggtatgtggtggggcctgagacggagtatgttctgtttcctaacccgacggtggcgaaaggactgcgcgccggcctgatgctggagaaattatcctgagggcaagccgtccgccgggcggcctgctttattgtgcgcgtcttttttcgccatcttattttttcgtgctccactgtaaatttgcagattattcctggtaaaatgctttgtttttaatctcccctcctttatactctccataatttctctgcaaaacagtaagttatttattttttattgcaattcttcggctaaattccttattttctccataattggcgagaaactgttttttacactttcattgttttactcttgctctgactaattgacgattaacgtcgtaaagttaatctcgtcaacacggcaacgcgccgtaagaataacgtaaagtaaggattgaatgatgaagaaactcactgcactgtttgttgcctctactctggctctgggcgcggctaacctggcacacgccgccgataccaccaccgcgccgagcgacagcaagccgatgatgatgcatcataaaggcggcccgggtcagcatgacatgatgtttaaaggcctgaacctgaccgatgcgcagaagcagcagatccgcgacatcatgaagagccagcgcgaaaatatgaaacgtccgtcccttgaagaacgccgcgcgatgcacgatctgatcgccagcgacaccttcgataaggcgaaggcggaagcgcagatcgataagatggaagcgcagcataaagcgatggcgctgtcccgcctggaaacgcagaacaagatctacaacattctgaccccagagcagaaaaaacagttcaatgctaattttgagaagcatctgacagaacgcaacgcgccggcaggtaaaatgcctgcacctgctgaataatgtagcgcaccgaatcaagaccgccggtcttgcccaataatgccatcaggcgttgggcagggccggcggttttttattggtggcttctcagccaagcggatgcagcggatagtctccgctgagcaaaggcttacagaggatcttgtaaccatcctggtcaaatccggcgggcagacgggtcaactccgccgcctggtcgagcgattcaacggcgcccagccacagccagttatgaatgacgtgatactgcgtcatgtccgggccgcgctcctccagcgccacgggccccgcccacggccagcacaccagctgcagtctgctcatctgcgccagcaggcgctctctgtgcgcctccacgctctcctttccacagcaggccccggcgcagcggcccagcgcggagcgaaagcaggcgcggccgcggctgagtggttccagaccaagcaggccataacagaggcgctgttcgtcagcgaggctctgcagcatctgcagcgccgcccgccggttggcgaacaggccatagagatgctgctggtgcgagaaatcaacctcacgggcatagacaatctgcggccggtcgtccgcaagtagccaggcgcagagctgcttgttacgccgtagccgcttgttaaacagcggctgctgctctttaatcaaccgcgcctccagcagcagcgctcccagctcgccagcggtgcgctgccaggtgatacgccgcgactgacgcagcatcgcggcctcttcaggggtgcgcaggtgggataacacccggctgcggaggttgacgctcttaccgatatagagcggcatcgtgtcgctgtcgccgtgaaactgatagacgcccggcagcttcggcagcgcctccagccacgggcgaagatgttcgggatattcatagatcgccgccgcctcaaactcgagacgcggggctgattgctttctggccacaataactcctggtactgtctatccatccagtatagcaggccatttttgcggcgaaaaggacaaaaaataaccccggcgcaggccggggcggggggagagactattttttccagaaatcgtcaaagacggtgatcggcggccgacgcttgtgttcggttttcagataccagccctcgatcgttttggcgatgctcgggtccagcgttttgccttccagataatcgtcgatgttctcgtaggtgacacccagggccacttcatccggcagggaggggcgatcgtcttccaggtcggcggtgggcagcttcttatacagatgttccgggcagccgagatgggccagcagctgtttgccctgacgtttgttcaggcggaaaattgggttgatgtcggtgccgccgtcgccatatttggtgaaaaagccggtaatcgcttccgccgcatggtcggtaccgaccacaactcctttggtcattccggcgatgctgtactgggccttcattcgctcacgggctttttcatttccgcgaacgaagtcgctcagttcgatgccagcttcgcgcagcgcctgttcgctggccagcaccgcagctttaatattgactgtcaacacccggtcaggctggataaatgcgatggcgtcctggcagtcctgctcatcagcctgcacgccatagggtaaacggacggcgataaactgcaggctactgtcgccggtttcggcacgcagttcgttaatcgctatctggcacagttttcccgtcagggtggagtcctgaccgccgctgatacccagcaccagcgatttaataaacgggtaggtctgcaggtatgacttcaggaaatcgacgctgcggcggatctcgcctgcgacatcaatctgcggctttgcgcccagcgcctgaataatctcttgttgtagcgtcatcgcgccctccgaaagtgaatctgtttggcaagctgttggcttaaagctacctctttgccgctgaaacgacaaggaccggggttttgactgccggaaaagaaggcaatcaatgacataggttttcattatagatgctgtaccgcgcattgcgccgccgtccgacgtcggcagaacaatcctgtttacgcaataacataacctgacatgatttcgctgttcggcttgaaaaataacactatttattccaggcttatcgttacacagtagaaaagaggaaccaaaatgaacaaaagcttagcaggaatactgggcgtcaccgtcgcgttaaccttactggcgggctgtaccgcttacgatcgtaccaaagaccagtttacccagccggtggtgaaagatgtgaagaaagggatgtcgcgtcagcaggtgatgcagatcgccggcaaaccttcaacggaagtcaccatggtccatgcccgcggcacctgccagacctatatcctcggtcaacgagatggtaaagttgaaacctactttgtggccctcgacgaaacgggtcacgtcatgaactccggctaccagacctgcgccgagtatgataccgacccgcgcaacgccaggtaagcttcctactgtttactgacttctacgtaagcccgaccactggtcgggcttttttgtgagtaatgatgcttatttaattgcgcgaattatttggatgaaaatgtgagggtagtcaaaaccggaggtcaatgagagacaattctgttcaacagcgaattatcctggcggctcagcttgccgtatactcaactcataaacagaattaaccggatgttaccagtcttaccggctctcagcggttactgaaggccctggtctcacacattgaggaagcgttcatggaaaagaaacacatttatctcttctgctcggcaggcatgtccacgtcactgctggtctccaaaatgcgggcgcaggcggaaaaatatgaagtcccggtcattattgaagcctatcccgaaaccctcgcgggcgaaaaagggccggaagccgacgtagtattattagggccacaaattgcgtatatgttaccggaaattcagcgcctgctgccgaataaaccggttgaagttatcgactcccttctctatggcaaagttgatggtttaggggtattgaaagccgccgtcgcggctattaagaaagctgcagcacaataattttaacttttaaaactcgatgtattttgacgcctggcggctgcctgttgccggacgtcaaaaaataatgagtttattttcccgtcaaagagtaatttcatacatcatcgccgtaatagtttattgcggcttttaagggtattgactatgagtaaagtgatcgattcgcttgaaaaggtactccttccttttgcagtgaaaataggaaagcagccgcatattaatgcaataaaaaatggatttattaaattaatgccgttgaccctcgccggggccatgtttgtgttaattaacaacgtttttctgagcttcggcgaaggctctttcttttattccatgggcattcgcctggatgcctccaccattgaaaccttaaacggctttaaggctatcggcggaaacgtctataacggcaccctcgggattatgtcgctaatggcgccgttctttatcggctccgcgttggcggaagagcgcaaagttgacccgatggcagctggcctgctggcggtggcggccttcatgaccgtgaccccgtatagcgtgggcgaagcctatgcggtgggcgccaactggttgggcgggcagaacatcatctccgggatgattatcggtctggtcgttgcggaactgttcaccttcgtgatccgtcgcaactgggtgattagactgccggacagcgtgccggggtcggtatcacgctctttctcagcgctgatcccgggcttcttgatcctctccatcttcggcattatttcgtgggccctggcgagctatggcagcaacttccaccagatcatcatggactctatctcgacgccgctggcggcgatgggcagcgtggttggctgggcatacgttatctttaactctctgctgtggttcttcggtgtgcacggttctctggcgcttaccgccctggataacggcatcatgacgccgtgggcgctggaaaacatcgcgctgtacaaccagtacggctctgttgatgcggccatcgaagcgggcaaacagttccacttctgggctaagccgatgctcgactcctacatcctgctgggtggctccggggcgacgctgggtctgattatcgccatctttatcgcttctcgccgcgctgaccatcgtcaggttgctaagctggcgctgccgtcaggcatcttccagattaacgaaccgattctgtttggtctgccgatcatcatgaacccggtgatgttcatcccgttcgtgctggttcagccgattctggcggccattacgctggcggcctacagcctggggattatcccaccggtgaccaacctggcgccgtggactatgccgaccggtttgggagcgttctttaacagtaacggcagcgttgccgccctgctggtggccctgttcaaccttggcgtcgctaccctggtctacctgccgtttgtggtgctgtcgaataaagcgcagaccgttatcgagcaggaagagagcgaagaagacatcgctaacgcactgaaattctgataccgcgcggtacgggcagcgtcccgtaccgcctgaaaatgagggaaatattatgtttgatctggacaacatcgacgcggtagagaccccggaaaatgacctcgaagaggtagtgatggggctgattatcaactccggacaagcccgtagcctggcctatggcgcgctgaagcaggcgaagcagggcgactttgccgcagcgaaagcgatgatggagcagtcgcgccaggcgctcagcgaggcgcatcgcgtgcagacccagcttatcgaaagcgacgagggcgaagggaaaatgaaggtcagcctggtgctggtgcatgcccaggaccatctgatgacctccatgctggctcgtgagctggtggccgaattgattgagctgcacgagaaggtacaataggccatcgcgacgatgaggcagcccagaatgatgaccaccgagatcagtaccgcccgagaacaacagctgttcaacgggaagaactttcatgtggtcatctataacaaaacggaaagcgtgagcgggcttcaccagcatgattactacgaatttaccgtggtgttaaccgggcgctattaccaggagatcaatggcaaacgggtgctgctggagcgcggggatttcgtctttatcccgatgggctcgcaccaccagagcttttacgagttcggggcgacgcgcatccttaacgtcggcatcagcagacgcttctttgagaaacactacctgccgctgctgccgtttggtctggtggcttcgcaagtctacgccgtgcagagcgcttttctcggctacgttgagtcggtcatcgcctcactcaattttcgcgaaacggaatttgacgaatttatcgagctggtctccttttatgtcattaaccgtttacgccactatcgtgaagagccggttgccgacgtgacgccgcaatggttaaaaaataccgtggaagccatgcatgataagctgaaattcggtgaaggcgctctcgaaaatatggttcgcttatccggaaaaacgcaggaatatttaacccgggcgacccagcgctattatggtaaaacgccgatgcagataattaatgatatccgtatcaactttgccaaaaaacagctggaaattaccaattattcggtgacggatattgcgtatgaatcaggttacagcagcccgagcttgtttattaaaacctttaaaaaactgacgtcgtttacgccgagcagttatcgcaaacatttgaccagtattaattaaacccgcgcggcgttcgccgccaggtttataccgaaaatcattcaagttaactgtccgcattgttgcggagagcggcctgcgtccaggcgcagcgcctaagggagaaaaagatgagccagaaattaaaagtagtcactattggcggcggcagcagctataccccggaattactggaaggatttctgaaacgttatcatgaactgccggtaagcgaactgtggttggtagacgtcgaagagggccaggagaagctcgatattatccacgcgctgtgccagcggatggtggaaaaagccggcgtgccgatgaaagtctataaaacgctggatcgccgcgcagcgctgcagggcgcagatttcgtcaccacccagctgcgcgtgggccagctgaaggcgcgtgaaaaagatgagcgcatcccgctgagtcacggctacctgggtcaggagaccaacggggcgggcgggttgtttaaaggactgcgcaccatcccggtgattttcgatatcgtgaaagatgtgcaggaaatttgccccgacgcatggatcatcaacttcaccaacccggcgggcatggtcaccgaggcggtctatcgccacaccaatttcaaacgctttatcggcgtgtgcaacattcctatcggcatgaagatgttcatcaccgacgtgctgcagctgagcccgagcgatgagctgaatatcgacctgtttggtctgaaccacctggtgttcgtccgcgacgtgctggttaacggcgtctcgcgcttcgatgaactgctggacggcgtggcctccggccgtctgaccgcgaactcggtgaaaaacatcttcgacctgccgtttagcgaagggctgatccgctccctgcgcctgatcccatgctcttacctgctctactactttaagccaaaagagatgctggcgattgagatgggcgagtactacaaaggcggtgcgcgcgcccaggtggtgcagaaggtggagaaacagctgttcgagctgtataaaaacccggatcttaacgttaagccgaaggagctggagcagcgcggcggggcctattactctgatgccgcttgcgaagtaatcaatgccatctataacgacaagcagactgagcactatgtgaatatcccgcatcatggtcatgtcgataatatcccggcggactgggcggtagagatgagctgcaccttaggccgcgacggcgcgaagccgacgccgcgcattactcatttcgatgagaaggtgttagggcttatctacaccatcaaggggttcgaagtggcggccagccaggcggcgatcagcggtgagctgaacgatgtcctgttggcgctgaacttaagcccgctgatccattccgatcgtgacgccgaacagctggcgcgggagatgattctggcgcatgaaaaatggctgccgaactttgcggcgacgatcgaaaaactaaaatcgtaacgggagtagcaaatggaacgcgtattgatcgtcaatgccgacgacttcggcctcagtaaagggcagaactacggcattatcgaggcctgtcgcaacggcgtggtgacatcgaccaccgcgctggtcaacggcgcggccattgaccacgccgcccagctgagccgcagtactccggagctggcggtcggtatgcactttgtactgacgctgggcgagccgctgtcggccatgccgggattaacccgcgatggccggctgggcaaatggatctggcagcaggcggaagaagatagcctgccgctggaagagatcgcccacgagctggcgtgtcagtaccatcgttttgtcgaactcttcggccatgagccgacgcatatcgacagccatcaccatgttcatatgttcgcccagatttatcccatcgtcgcggcctttgcccgcgagaagggcattgcgttacgcattgaccgccaggtggcggcgcagagtgggctcgaccagcaggcggcgcgcagcagcgccggcttcagcagcgagttttacggcgaagcggtctctgaggaactgtttctgcagacgctggatgcctccatcgcccgcggggagcgctccctggaggtgatgtgtcatccggcttatgtcgatcggatcattatgggcagcgcctactgctatccgcgactggatgagcttgatgtgctgacatctgcctcgctgaaagcggcggtggccgaccggggttatcgtctgggaacctaccgcgacgtgtaagcccgacgggggaaagggaaagtgaatcaagcccggcacagcgtgccgggctttttactacgccggaatagcggcgattttcgggcttctcgaccacacgcggtgggccgtcatcagggcgagcagtttgtccgccgctggcgtgtcgagcgcatcggtgacgatgaccccctcttcaccctgggtcggaacatgcagaacggacgtcagctgccgcgcatcccctgccagcaggatcggcttcagatgtttataggcttccagcaggtaatagcgcgcgtcaccgctctgactcagggcgctgaggtcgccgccgggcaccaccaccgcatccaccgtcagcgacggggaaccggcgaaggtgccggcgatcggcagcggagaaccatcgtcggcaatgacttcgcccattcgcgagtagagcagcttgctgtgcacgccctgggcctgcagcgcctgcaggagctgaaccagatcctgcgctgaggtgcgttcgttgagcaggactgccaccacgcgacctttcacatctccttcggcgtcggcgtagaggctgaggctggggtctttctccacgccattgaccggggcgggcagggtaatgttgcgctgatcgtcgctcagttcgatccctaagttcgccccaaccgcttccgcaagcttagtatcaatgtgggccagatgatcgaccacccgctcgcggatccaggtgcggaccactttgctgagttcgaagctgaaaccatcgataatatgctgctgttcaatcggcgtctggctcagccagaacagacgcggctgggcgtaatattcgccgaacgaagggctgcgctggcggattttttcgccgtcgacgcgctcggcgagggactcaaagccaccgcgtttggcggcaggcggcgtctcgcgcggccagttgtcgttaatcgagttgggctcgtagttggccggattggtgtcaatgtccatccggtgcatcccgtcacgctggaaattatgatacgggcaggtcggacggttgatggggatttcatggaagttcggcccacccaggcggctaatttgcgtatcggtgtaagagaagagacgcccctgcagcagcggatcgttgctgaaatcaatgcccgggacgatatgtccgggatggaaggccgcctgttcattttcggcaaagaagttatccgggttgcggttgaggaccattctgccaacccgctgcaccggcaccagcgcctcggggatcagcttggtgggatcgagcaggtcgaagtcaaaagcaaattcattctcttcggggatcaattgcaggccaagctcaaattccgggtagtccccggcttcgatggcctcccatagatcgcggcgatgaaaatcggggtcgcggccggtcagcttctgcgcttcatcccacaccagcgacgccttgccggcgaccggtttccagtgaaagcgaacgaaggtggctttgccctcggcattaatcagacggaaggtgtggatcccgaagccttccatggtgcgatagctgcgcgggatgccgcgatccgacatcgcccacatcacgttgtgcagcgtttccggctgcaaggaaacatagtcccagaaagtatcgtgggcgctctgcccctgtgggatggcccagtggggttcaggcttcacggcgtggacaaagtcggggaacttcatcgcgtcctggatgaagaagaccggtgtgttgttgcccaccaggtcaaaaatcccttcgtcagtgtaaaacttggtagcgaagccgcgaatatcgcggacggtgtccgccgaccccgcgccgccctgcacggtggaaaagcgtacaaacaccggggtgattttatcggctgacgaaagaaaatcggctttagtcaacgcagccaggcttttgtagggctggaagtagccgtgggcggcagagccgcgggcatgaacgatacgctccggaatacgctcgtggtcaaagtgggtgatcttctcccgcaggataaaatcttccagcagcgttgggccgcggctaccggcgcgcagcgaattctgatcgtcagcaatgcgcacgccctggttggtggtcagcggaaaatcttcccccctttgcgttgcgcctccagggaatccagtttgctgttatgagtatcgggcgctttcaggctgcctggggcggtgggttcgacgcccggagcggtaggtttcggcgtggggcgccactcccgatcgtccggcgccagcgaatcgagacccggctgcgcttcctcgctgtcgtggaccggtgcctgctgttggtgagggttcgggtgcttatcagacattactcgtctcctgctttcattgctaaaagtggtcgttgatagaccaaaacccttctaactatagaacattacgttgtctgcgcccggcgagggggcagggagttatcctaaaatgcgcatcggcggcgaaggggcgacgaacggggccacaatcggctatgatagaggtttctatttcccgctatgtttagtgaatccatttgttatgaaaccattgcgccaacaaaatcgccctgtcattagctacgtgccgcgcgtggagcctgcgcccccggaacatgccgtgaaaatggaccattttcgcgatgtctggattttgcgcgggaagtatgtcgcttttctgctgatgggggagcatttccgtcgctcaccggcattcagcgtgccggagtcggcgcagcgctgggctaaccaggtgcgtcaggaaggtgagattgaagcctgagtcggctgcagaaataaaaaaaccgctgaatgatcagcggtttttttgtgcttgccgtttagcgatgcgccagttcggcttcttcctcgctatcgaagatcgacttgtcggtctggcgcagccactggctggtcagcgtcccggcggtcattgagccgttaacgttcagcgcggtacgccccatatcgatcagcggttcgacggagatgagcagggctaccagggtcaccggcaggcccatcgccggcaggacgatcagcgcggcgaatgtcgcgccgccgcccaccccggcgacgcccgccgagctgacggtgacgatgcccacgagggtggcaatccacataggatccagcgggttgatgcccacggtcggcgcgaccatcaccgccaacattgccggatagataccggcgcagccgttctggccgatggtggcgccaaaggaggcggagaagctggcaatcgactccggtacgccgagacgacgggtttgcgcctcaacgttcagcggaatggaggcggcgctggagcggctggtaaaggcgaaggtgatcaccggccagactttacggaagtacttcagcgggctgacgccgttaatcgccagcagcaggccgtggacgacaaacataatacccagcgcaatgtacgaggctaccacgaagccgccaagcttgatgatgtcctgcaaattcgacccggcaaccactttggtcatcagggccagcacaccgtaaggggtcagctgcatgaccagacgaaccagcttcattacccagccctgcagggtatcgatcgcggtcagcacgcgctggcctttttccacatcctctttcagcaacttaagcgctgcgacgccgaggaacgccgagaaaatgacgatgctgatgatggaggttgggttagccccggtcaggtcagcaaacgggttcttcggcacgaaggaaaggatcagctgcgggacgctgagatccgctactttccccacatagttgctctggatggcgttcagacgggcggtctccgcgctgccctggaccagaccctcggcggtgaggccgaacatattggtcaccagcacgccaaccagggcggcgatcagggtggtgaacaacagagtaccgatgctcaggaagctaattttccccagctgcgaggcattgtgcaggcgggccaccgcgctaaggatggaggcgaagaccagcggcataacaatcatttgcagcagctggacgtaaccgttgccgacgatattgaaccactggatggaatccttcagcacctggctgtcagacccgtagatcagctgcagcgccagaccaaataccacgccagtcgccagaccgaccagcacttttctggccaggctccactgtttatgacgtgtttgccccagcgcaaacagtaatacggcgaacacgactacgttcgctattaatggaaagttcatccccgttctcctgatatttttataacctgggctggtggataaccagctcttatgacggcaaggttagcagaaggcgttatcaaggacttatattcaaatggaatgggttataaccaaatggcgttttccgccgctttatcgcccactctggtgacttataaagcgattgaaggtgatctgcagggaattgatcaccccggatgaccagcgtatcgcgctgttgtccgccagcgtctgcggcatccagacggcatagacgaacagcgccatacacaaggcgcgttcgagctgattgcccttgcgcggcgcaaggatcggcagccggaagcgccagcgacagggccacagcagcggcacaccggcgggggtgagcatatcggcgagaatgtggctgagatagcccagcaccaggccctggagagcgtctgccgggacaatccagctgtcaggcactttcagatagaacagcgtcagcgcgccaaagacggccagcaggctgtgggtgaagccgcggtggccaaaggcccgcgccacgggctttgagatccagctcagccgttggccaagaaacgacttggggtgatcgatgtccggcagcaggcaggtcaataccgccgagggcacaatatgccaccagtcgccctgcgccagcaccggcgttaactctgcgtttttggcaaatactgcgcaggcgattgaaaagaagagatggccttccgccgtcatgataacacaccctaaactgtcgattcatacagtatagggtttttatacagtgtacggaagaggtgacggtgtaactctttgtcacaaactctcagcgcgccaaccatccgccatcgacggccagcgtatagccgttaatatagtcggccgctgatgaggcgagaaacaccaccggcccctgcaggtctttcggcgctccccagcgaccagcgggaatgcgctcgaggatcgcctggttacgctcttcatcttcgcgcagcgcctgggtgttattggtggccatatacccgggcgctatggcgttgacgttgataccctggccagcccattcgttggccagcagacgggtcaaacccagcacgccgcttttcgaggcggtgtaggaggggacgcggatcccgccctgaaacgagagcatcgaggcgatgttaatgattttcccgccttccccctggcgaatgaactgcctggcgaccgcctggctgagaaagaaaaccgctttgagattcaggtcgatcaccgcgtcccagtcgctttccgtgaaggtcagggcatcatggcggcggataattccggcgttgttgaccagaatatcgacccggcccatcgccgccaccgcctggtcgaccagaccgctcatatcattctcttgactgagatccgcctgaatggcgtgaaagcggcggcccagcgccagcacctgggcggccgtatcatggggaattttacggttgatgccgacgatatcgcacccggcctgcgccaggcccagcgtcattccctgtcccaggccggtatcgcaaccggtcacgatggcgaccttacccgtcaggtcgaaggcgttcagtaccatattcacctctgtcagctgatctactggcgtacgatgacgccacctgtgaccagcatagagggaggaaaacaaaattacaattaaaatgaaacaatgttttgattttgttgctggcggcgtgacagcgattgttgcacccgccagcggtcttagccgagcaagttctcagcagtgagtgccagcagtgacgaaagcttgacgtccgccagcgcaaagcgcgggtcgcggctgttctccgcttccggcaccacgatagaccgcatgcgcgcggctttgctggcgatcatgccgttgaccgaatcctccagcgcgacgcagcgctgcgggtcgactcccagggcagcggcgcaattgaggtagacctgcgggtgcggtttgctccagggtaaatgctccgcggaggcgagagcatcaaactggtcgcgcagttcaaacatatcgagcactttctccagcatcatcagcggcgaggccgaggccaggcccacctttaagccctgagctttacacagggccactgcctcgcgtacgcccggcagcagcgggcgtgaggcttccaccagctcaatggcgcgacgaataatgcgcgcggtagcttccgcccggtctacgccgtgccacggctgctgcgcgtaccacagatccaccaccaggtcgattcgcagaccgagcaggtcgggcagttcatcgcggcgacgggtatccactcccaggctctccatgacctcgacctccgcctgatcccagagcggctccgagtcaatcagcaacccgtccatatcaaatatcgcggcctcaatgcggcgcttcgctgacatatgtccttctcctgttgcgtaatcagataaacgaatcggcaatcatggtatatcataccgcgcattattgggcgaaattcgccatggcagatagacttatacccgacatactcggggagcgagggaagccagcgccacgcaacaggcagcaggcgaaccaccaacgcgtctttaacaaggggaactcatgacgtaccaacaagctggacgcatagcggttatcaaacgcattttaggatgggttatctttattcccgccgtgctgtcgacgctgatttctgtgctcaaatttatgtatgagcacagtgaaaagaaacccggcattgatgcggtaatgatggattttgcgcacgtgatgattgagatgatgcgctttaacacgccgttcctgaactttttctggtacaactcgccgctgccggattttcaccatagcctgaacatcggcttctggatcatcttcattctggtgttcgtcggcatggccctgcaggcttccggcgcgcgaatggcgcggcaggcgaaatttctccgcgaggggattgaggatcagctgatcctcgaacaggccaaaggcgcagatgggttaacccgcgagcagcttgctgaacgcattgtggtaccgcgccatactatcctggtgcagtatttcccactgtacgtgctaccggtgatcgtgattgtcatcggttacttcttcttttcgctgctgggctttctgtaagtcaggtgcccggcaagccgggcaccttcttattccgctggcagaggacgtggttttccctgattatcaacggcaacgtagataaacagcgcttccgtcgccttgtagcgctggccaatcggttctgaagagacttttttcacccacacttcgatattaattgtcaccgaggtgttgccgcgcttcacgcagcgggcgtagcagcacaccacgtcgccaacggcgaccggacgtaaaaaggtcatcccatccacccgcacggtcaccacgcgaccctgggcgatctctttggccataatggcgccgccaatatccatctgcgacatcagccagccgccaaaaatatccccgttggcattggtatccgccggcattgccagggtgcgtaaaaccatttcgccctttggggcgagatctgttgttgtcatgctctactctgctgtggtcaaagacgatcagcgggatgctactatgaaaatagcgcagtgagaataggggaatacgcccgctggcgcgggcgcggtggttcagaaggagagggtaacgccggcgtaatacgcgcggccaggctcattgtaggtcgaggcgccggcattttcgcgatacagttgtttatcaaatagattacttattccggcattcaggcgaatatcccggtttagctgatactgagtaccaatacccacgatggaataggcgccaacctcggtggtggcaagggtcccggtttcgttgcggatctccgcatactgacgcggcttctgacggccataaagcgtccagttcacattcgcagacagggcgtcgtttacctgccagtcgagcatcgtgttaacggtatatttcgggataaccgacagcgggttgccagtctctttactttcagatttgagcatccaggtggcattggtccgccagctgaggacatctctcagcaccgggatcagcagatttccttccagccctcgaccacggctttgctgccgttctgccattgcaaaatattattgccgctggaggtatagcccagtacctctgttccggagacgattttgtttttgtaatcgttgcgaaaccaggtgactccggcagcgtaaccattaaggttaaattcgataccgatctctttgttgatactgatctccgggtcgaggtcagggttacccagcaggtagcagctgccttcagcgatcgtgtttggacaaccgttgccgcgggtggagagcaaatagcctttactggattgatagaggtttggcgctttaaacacgcgcgcgataccggccttcagcgtgaacatatcgccgagctcctgggacagattgaggctggggctccagttactgccaaactgattatgataatcgaagcgaatgccggggatcaggttggtgccgggcacggcttcgatattatcttccagatagataccggtgagggtggcgctgtttttggtactgcgttgcgtagggtcgcccgaggtcccagggatagtctcgccgttgctgttagtggcctgcattgatgccgggtcgtcgagctgatcatggttccattccattcccagcgtcagcgtctggtccgccagccagaagaaaggcacattgaattccgaggtagtacgccaggattccagacggctggtggcataatcttcactgttgatcatgccttcgacgcggccggtagagccttcctgcaggcgggtattgttggttttctcgtagtaaacaccggctttggactgaccccaatcccatagaccgttgtaggtcagtccccaggactggcgatagaggcgatttgtttcgtggccatacagggagtccaccagcccgttcgggctaagattgccgttgctgtactgggtatcaccagcatagatattcccctgacggctataggcgtagctgaaatcgaggatctgttgcggggtcattttccatgacagcaaggtgttaatatctttattgcggaccccttcgcgtcccgcagcgtaagagccgttttgcgcatggttaatatcccaggcgtcgggttccgttttattgatattgccatacaggcgcatcgtcagcgcctcgccggccagtgggccgctgagattgaagttagcgcgattggtcgtgccttctttgttgttttccggctggttggtgaagaaagacagcgaaccgtgccaggtgttggtcggacgtttggtaatgatattgaccactccgcccgccgcgccggaaccatagcgcgcggctgccggaccgcggagaacttcaatccgttcgaccatttcggcaggtacccagttgctgtcgccccgggtatcgcgttcgccgcgccagctatagcgaaccgcgttacgtgaggtgaccggtaccccatctatcaggatcagggtgttctccggccccatgccgcggatatcaatctggcggttgttgccccgactgccgctggcgctgttgccggtcaagttcaccccgggcattttacggatgatgtctgagagatcgttgaccggcggctgcttagcaatatcctcagccgtgataatcgacaccccgggctgttgcttaagcgcctcttccgccgtactgcgcacaatcatcgtttcggtatcttgttctgattcttcagcaaaggcgttaggggcgaggagactggatatgaccagcgccagggtcgtgggcacagaatattgcggcgatctcatgtaaatatccttttcaaaacaatgcaaaatgagatcgagaatattaatgataacaattatcattacaatgtaacgagatgaatctccataaaatcctcacaattaccgcaactttttatgcagttgagagaaatcgtgaagagagcctgcacagtgtggccgggaagctgtcagcgtatgcgctgaggttgtgtggttgcagggaatgtttgccagtgcagtaagcttatagggggcgagcgcggcgcgcgatggcgcgccggcggaggggttagtggtggtcgtcctgcggcatatgacggtagatgtagatcccgctcagcaaggtaaagaccagcgtgagggcggttaaaccaaagaccttaaagttaacccagatattctgcggcagccagaaggcgatatagatattggccagcccgcagagaataaagaacagcgcccaggccaggttaagtcgcgaccagacctgctgcggcaggctcagctctttacccagcatgcgctggatcagcggctttttcatcacccactggctgaacagcagcgcgccggcgaacagggcatagatcaccgtcaccttccatttaataaactcatcattatggaagaagatggttaacccgccgaagacggccaccagcacgaaggtgatcagcgccattttttccactttccggtagcgcacccagctgtagatcagcacgacggcggtcgccacaatcagcgccgtggtggcggcgtagatatcgtaaagcttataaaaggcaaagaagaccaccagcggtaaaaaatccagaaactgcttcatacatcgatcccgtctttcaggacggaccggggaaggccccggtcctggttaaaattagctgcggataagcatatacacgcggaataaatagatcagcaacagggcggaaatcaggttgctgatggtattaatcaccaccgcgccgacgtttggcgtcagggcggcaaagctggaagcaaacagtaacagcagggttttcgccaccagccaaccgataatagccggcgccaccagtcgcagattggcccacgccaggcgcatgctgctgcgcatggcgccgaggatgcccattttgtcctgtaccagcatgatcggcgcaaaggccagcacgatggccagcagcacgccgggcaccagcaccagcatcatccccatctgcaccaggaaggtggtgaacaggatcagcagcagcagcttgggcagcaccggcgccgaggcgccgatggcgcgcagggcgctaacgcgatgaccggcggagaccagctggatcagcagcaggacgccgccgacgaggatcgcattacctaccagacccgagaaggttgatgccgccgaggcgcgcagcagaacctgctgctgctccggcgtcatgttctgcacaagctcgaacagcccggcgctaccggcgaggttatcgccttcgctgagtatcgacagctgctcgtcgctgggtgaaaaggcatggccaagtactaccgtaataaacgcgcacaacagcgcaatcagtaaaatagtaatgaactgattacgaaaaaaattcccggtgtcacggtagacggacttcgccgtgatagacatgcattctccttgagtgtcgcaggtgttaactagccggcgattgtaccgcaaatcgttccgtcgtagcactctctgcgccggtcagggcaggtatatctttgtaaagaggccgcaatggtggcaggccgtagcgcgcccgcgcccggttgcaggcatcgttttcctcgccattttccccggacagggcgaattcgcgacacggcgaaggccggttttcataaatagtgcagtgaacggcgtcgccgatatcgccagacagggccgcgcagcggctctggcgctgattggtgccgctcatgcagcgcaggaaaggggtcagcggttcggtcagcgcggagggcaccaggccgcccgcatcgtcggcttccgcccagtagaaagagactcgaaaatacgcacaacaggcaccgcacgtcatgcacgggttgatttcactcataattacacctgaaaaaaacgcatcaacacagattgtcggcagttaacttatccagccgcctcagcgtcggcaagaggggcagaaataaatttttgcgcgaaaagtgaaaattgatgtgcgaacaattcaaggcattgcgatcggtagcgaaaattaatctggatcaataaatgttaaatctgaggacttagtgtgatctaaaacagatcaaacgtaactcgttataggtatatttggccgcgctgaaaaaccataatgaggaagtggatatgaagaagttagcagcggcggcattgattcttggcacgctttctatcggcagcgtctgggcgcatgaagcgggtgagtttttcattcgtgccgggaccgccaccgtccgaccgacggagggctctgacaatgtgttaggcagccttggcagtttcaacgtcagtaacaatacccagctgggtttaacctttacctatatggcgaccgataacattggcgtggagttgcttgccgcgacgccgttccgccataaggtcggcaccgggccaaccgggactatcgccaccgtccatcagctgccgcccaccctgatggcgcagtggtactttggcgatgcgcaaagcaaggtgcgcccgtacgtgggggccggtatcaactacaccaccttctttaatgaagactttaacgacaccggcaaggcggccgggctttccgatctgagcctgaaggactcctggggcgcggcggggcaggtcggcctcgattatctgattaaccgcgactggctgctgaatatgtcggtgtggtacatggatatcgacaccgatgtgaaattcaaagccggcggcgtggaccagaaagtcagcacccgtctggatccgtgggtgtttatgttctccgcaggctatcggttctaaattcttctgtaaactggccaacggatggccagttcattgtctcgtcacacctgtctgccgcaagcctctgtcatcaacagcggatcacacttccgtccactggcgcagcaggttgtgatacatgttgagcagggagaggacctcttctccgtcgccaaagcgggtcttcagagactggatggtgcggtccaggtcgtaaagcatcgcacgctgcttatcgtcgcggaccatcgactggatccacaggaaagaggcctggcggacgccgcgggtgaccggggtgacgcagtgcaggctgctggcgggatagagcaccagatgcccggccgggagcttcacccgatgttggccataggtgtcttcaatcaccagttcgccaccctcatagctctccggatcgcaaaggaacagcgtcgctgacagatcagtgcgcatccagcccgcctcgccgttctggcgaacggcgccatcgacgtgaaaaccataggtctcccctggcccatagcggttaaacaacggcgcggaaatcgtccgcggcagcgcggcggaaaaaaactgcggatggccgcgcagcatatcgagcacagcggcctgcaggcgggcatacagcggcgttcgggtatcgatctgctggttctgtttgacggccgccccctggctacccaccgtaacccgcccgtcgacccactcggcctgcgccagctgccgggtaaattccgccacctggtctgtcgatagcacgtcaggaatgtgatacatcatcgcggtgttctctctaaaaggtggggcgcaacggccccacgcgcagactcagaaatggacgttcgccgtcagcataaaggtccggggttcgcccggatgatagcgatagccgctcttgttgatggaggccacgtaatcggtatcaaacaggttatacatattgagctgcagatcgaggttgctgttgacccgatagcccagtttggcgtcggcaacccagtagccctcggtgtgatccggggtaccgactgcaccatcgctgccccggcgcaggcttccgacatagcgcacaccgccgccgacggacagatcgctggtggcctgatactgcgtccacagcgtaaaggcatgtttcggggtgtaggccagggcggaagatccatcctgtgcaacgttctgtccctccgtcactgtcgcatgctgctgagtgtagccggcgataatcgtccagtccggggtcaggtttccggtcgcggagagttcatacccctccacgcgctttttgccgtactgcgaccaggttccgtcatcgttggcggccacttcgttttcaatatcggtgcggaataacgccgcgctgagcagcagacggttgtcgaagatttgccacttggtgcccagctcgctggatttcgccttctgcggcttaaagtcggtccggttagcgctgttgccgctgccgctggcggccagggcgaagctgctgcctcccggcggctgctgtgagatggcgtagttgacgtagacattgccctgctcggttaagcggtacagcgccccggctttccagttaaccagattgccggatttagcggtatcgacagtggtgaccgggctgccggtcgactgtccgggcgggcaggcgatagccccgcgtccgctgccgccgcaggcggtggcgctgtcatatttggtatggtaattgtcgagacgcagcccgccgttgatctcaatccgctcggtcagcgtcagcgtatcgaaggcataaatcccgaaggtatcggtctggccgttggcgttcgccccgtttctgtccagcccgccaatcgacaggttgctcaccggatggtagagattcaccgccggcgcggtcctggcgttaacgccatagttggtctggttttcccgggtaaactccacgccggcgctgacgtcatggcctatcgagccagtattgaaagtcgaggtgatattggtctggttggtcagaatgcggttgctgacatctttggtattaaccagacgcgaccagctccaggtgttgacgtcattgatatcgggggcggtgatattgttcgcgccgcccatcaccgcggtcaaaagatactcctgtttcactcgcgaccagcgggtggtattgcgcacggtggtgctctctgtcagatcgtgttcgaagcgcagggtaccgctgtcggtagtagatttatcgtaatcggagtcggtgccatagaaattgctggtatcgaccttcccggcggagttgagtgcggcatacttcggcgaaggcgccgaatagcccggcaggccgacggtagggatcccgccatccggggtgttgttctgccggacgtgcagatagttcagatacagacgagttggggtatcaaggccgaaggccagcgacggtgcgatgccatagcgttcgttttcaatgcggtcccgaccagcgtcatgggttttttcccccatcaggttcagacggaacgcagcgttgtcgctaaacgcctggttcaggtcgagagtgccccggcgcgaccaggcgctgccgatgctggccgagccgtcgatcccggagtcaaggcgcggctgcttgctgatcatattgatcgagccggagggcgcgctgcggccatagtccgtgccggcgggccctttgatgacttccacctgctgggtattgaaggtatcgcgcgtcacgctgccgatgtcgcgaatgccgtccacatagatgctgttagaggtatccacgccgcgcataaagatggcatccccggtggttgagctgccattctccccggcataaaacgcccccacgccgggaacgtttttgagggcgtcagtcaggttggtgacgccctgatctttaatcacctgttccgggatcacggtgatggtgcgggtggtatcgaccagcggtttattgaacttgggatcggcggaagcgccgggggagtagagtgaaggcggagcggcttccactaccagcgtctcttcactatttttgaccgaattttccgctgcgatgcctgctgccggcgaggctcccagacacagacctgtaaacaatgccaatgagttgaaactgccgaaaggcagagaagcgtttttttccatgataaatgcaggcttattttttgttatgagcacatatcacaccgcgcaaaagcgacgttattcgtcgtctggcttgcgctgacccggtgtgattctataaatgataaaaagaatagttatcatttgccttaatatttacatagaaaagttgaccttaaaacaactttcttcacttcgatttacataattcacattttttgaacgataatgcgggaatatagggaaagtgctgcagaataaggtcggtagcaagccgcgccgggcggggttaacttccgggcggccatatgatggttgttccggctcggatcaccagggcacggtacggccctggtaatcgagatactccagtcccggacgttgccgtttgtcgagcaggacgttcaccaggcgtgggatcgtctcttcgatggtcagcggggcatctgccccgccgagctcggtgcggatccatcccggggccatcaccaccagcggatgggaggccgaggaggggcgagcggcaaagctgcgcataaacatattcagcgcagctttactcccgcggtagagttcccgctggccggtaaggttattggtcaggctcccctggccagaggacatgacgccgagcagcccctgcggtttaacggcctgctgcaggcgctcgataacccgcatcggcgccagggcattggtgagcatcacctggtaaaactcctcggtggagacgtcgccaatggtctgcgacgggtcacgattggtggtgccagcattgacgaacagtatgtcgaggctcgcggcgggaagcgtcgcctgcagcgcggtaagctgggcttcatcgcggatgtcgagcgtcgccaggcgtagccgcaggggatgcgtcttggccaggtcgtggagcggcgtgtgggatgataaatcgcgcacggtgccgatgacctcccagccgtgctggaggaacgtcgccgccatagcatggccaaggccgcgcgaggcgccgacgatgaggatagtgttgtgctgatcggatttcatgatgtctctcgctgcagaagggaggtcttcactataatcaggcccgagatcgggcggaagacgccgccagtgcactcatatcttgcagcaaacgccctgtctggcgactggagcgataatgaacgatcccgattttaatttgctggcggcctttgatggggtgcgggcggaggagagcgtggcgggcgccgcccggcgtctcggcctcagcacctcggcgatcagccgtacgctcacccggctgcggcatccgtcgccgcaggggatagtgcgttttccgctgccggtcagcactgaggtgattacggtgtcataggcgtggcatccgcgcctggagcaggcggcgggccactgctggctgcggcaattggtgcgtgaggtgtgtcgcgagtaaaaaaagcccgcacaagtgcgggcaaaaatactggaagcaatgtgagcaatgtcgtactgaatacccgagtgatttactcaactattcagtgatgagaaagataatatttctcatttaagatatcaaccccatcttttgtgcggaagcgattttttatccgagggtgaaaaccgtgcgcttttggctgtcgtcctgcggccaggccgccgcgatctcctgcagcggccgcggggtggtggcgatggtcaatttccccggcaccgccgcctgcagcatttcaccggtcgccgccagcagttgcgataccgacaggctaccgatcccgctgcccatcagcaggagcggggcggaacgcagcactgcgccatttaacgcgatatcggcgccagccagggaacccacctgcacatagcgcaccggactgccggcaggggtatatttcgccagtgccggcaataataattccgcgctgtgtccccacaggtaatcgatgaccacatcgatctgcgcggcgctgaccgctgaaaattgcccgctcaaggttttatcatcagcggttaactgaatacactcatcggcgtccagcgccgccagcgtctgcgcattccgtccggttgcaatgatttttttcgctcccagatagcgggcaatctgtaccgccaactgaccggcgctgccggtggcgccattaatcagcaccgtttcgccggcctgaagctgggcgcgtgtcaccagcgatgcccacgcggacataccggggttggccatcgccgccgcctggatatcatccagcgcatccggcagcggcagacaattctgcagggcgaccggcgcccgctgcgccatactgccgaagggggcggtggggaaggcgaagtagacgcgctggccctgaggtgtggtgccgacgccatcgataccgggcacaaagggcagattgccgtcgaagctgtaatggcgtccggatgcccgggccttaaccacatggcttatcgcggcggcgcggacgtcaatgagcgtctggccgggcgcgggctgcgggtcgataaaatcggcccaaaccgggccttctgcgaggtcaaaaaccacggctgctttcataaattatctcctgtcgggaattatgtgtaaaatacacatattgttttgcagcactatacgcggaaaattaatatatgcaagatgcacataatgactacgacattaccgactttcacggcgcgctactggatatcatcagcgtgatgaaccagccgctgcgcgacgagcagatcctccaggcggccggcgtccagctggaacagatgctgtttccgctgctggtggcggtaggacgccatggcccggtgggggtggttgagctggcggatcatttagggcgcgattacaccaccgtcagccgccaggtgaaaaaactggaagcccagggactcgcctgtaagcaacctaaccgtcatgaccgacggatcagcgaagtgacgcttagcgccagcggacaacagatgatcgacagtattgcggtagcgcggcggcggttaatgaatcaggtgctggcgcagtggccggaagatgaagtgcaggcgctgtttcgcttaacgcgcaaatacgccgacagtttgcagaaatcatcgccgcctggcgcgatgccaggcggctgatggtcaggcggttttggtcgctgccttcaggctctggacgaaggctttcagctcgtcgagcatggtctgcggctcatcgaggtggcgttcgatgattttgacgatggcggaaccggagatagccccggcggctccggcgtcaatggcggcgctcacctgctccggcgcggagataccaaagccctgcagcggcggcgcggcgtgatattccgccagcttctccaccaggtggtgcagcggaagcgcggcgcgattttccgcacccgtcactccggcgcgcgacagcagataggtgtagccgcggccataagaggcaatctggcgcagtaaatcgtcatccgcattgggcgggcagatgaaaatcggcgcgatgttatggcgcatcgccgcctggcggaacggggcggactcttccaccggcacgtcggccaccagcaccgagtcgacgccgacgcgggcgcactgggcatagaacgcatcgatgcccgggctgaagacgaggttggcatacatcagcaggccgattgggatggtcggatgcttctggcggatcgccgccagcatctcaaagcactgcgccggggtcactcccgcggcgaaggcgcgcagggccgcgccctggatggtcgggccgtccgccagcgggtcggagaaagggatccccagttcaagggcatcggcgccgccttcgatcagcgcatcgataattttcagcgactgctccggtcccggatcgccaagggtgacaaaggggacgaaggcgccttcctggcgatttttcagttgggcaaacagcgtctcatagcgttccatcagatttcccctcgcgctttcaggatgtcatgtacggtgaaaatgtctttgtcgccgcggccggagagattaaccaccagcagctgctctttttccgggttctcgcgcatcatcttcagcgcgtgggccagagcgtgagaggactccagcgccgggataatcccttcgtggcgggaaagcgctttaaacgcgtccagcgcttcgtcgtcggtgatcgacacataatcagcgcgaccggtgctgttcagaaacgcgtgctgcggcccaacggacgggaagtccagcccggcggaaatggagtaagactcttcgatctggccgtcggcggtctgcatcatcggcgacttcataccgaagtagatcccaacgcggccatgcttcagcggcgcgccgtgctcgccgctctcgataccgtgtccggcgggctccacgccgatcaggccgacgttggtttcctcgataaaatcagcgaacatgccgatggcgtttgatccgccgccgacgcaggcgatcaccgcgtccggcaggcggccctctttttcaaggatctgcgctttggtctcttcgccaatcatgcgctggaattcacgcacaatcgtcgggaacgggtgcggaccggcggcggtgcccagcatatagtgcgccttttcgtagctgccggaccagtcgcgcagcgcctcgttacaggcatctttcagcgtggcggagccgctgtgcaccgggatcacctcggcgcccatcaggcgcatacggaagacgttcggcgactggcgctcgacgtccttggcccccatgtagatacggcatttcaggccgagcagggcgctggccagcgctgaggcgacgccgtgctggccggcgccggtctcggcgataatttcggttttgcccatccgtttggccagcagagcctggcccagcacctggttggttttgtgcgcgccgccgtgcagcagatcttcgcgtttcaggtacagggtggtgcgggtgccttcggtcagattccggcatttggtcagggccgtcggacgaccggcgtagtttttcagcaggtcggtgaattccgcctgaaaggccgggtccttctgcgcgctgacaaaggcttcttccagctggcgcagggcgggcatcaggatctgcggcacatacatgccgccgaattcgccgaagtaggggttcagtaaagtgctcattattgctccttaatatgcgcgcagcgtctggaatacggaggccagcttgctggcgtctttcatcccgtgttgcgactctacgcctgaattgaaatcgagtccggcacagccgcttttggccgcttccacacagttatcggcgccgaggccgcccgccagcatgacgttgcgcagatcctggccctgcagcaggctccagtcaaagcgctggccgctgccgccctggccgttgtcgagcaggtacttgtcgacatggcggagcgtacgggccgggaaggtttcgccgacgctcagcgctttccagatgcggacgttgtccgcgagggcgtcgcgcagcgcgtcgatataggcctggtcttcatcaccgtgcagctgcacggcggccagccccagagcctgcgcgcgggcgaccaccacctccagcggcgcattgcggaagacgccgacgtactgtagcggcgcagcggcgatcaccgctttggcctgggcgtcattcaccgctcgcggcgaggtcgggacgaagatcagcccaccgtaaatggcgccggactcccaggccacctgggcatcctgcgggcgcgtcaggccgcacactttgttctcgccgagcagcacgcgtttaaccgccgtttccagatccgcctgctccatcagggcggagccgatcaggaagccgttggcgaagtggctcagctcgcgcacttcggcataggtatggatgccggattcgctgatcaccgtgacatccgggccgagacgcgccgccagctgacgggtgcggttaaggtcaatcgacatatcgcgcaggtcgcggttgttaatgcccaccaccttcgccttcaggtcgatggcgcgctccagttcctcttcattgctgacttcggtgagcacgcccatattcaggctgtgagccaccgccgagagctgacgatactgttcatcgtcgagcaccgagagcatcagcaggcaggcgtcggcctgatagtagcgcgccaggtagatctggtaagggtcgatggtgaagtccttacacaggatcggctgcggcgcgacctggctgacgatcggcaggaaatcgaagctgccctggaaatatttctcatcacacagcaccgagatcgccgaggcgtagtgcttgtagatgctggcgatcgctgccggatcgaaatcctcgcgaatcaaccccttcgacggtgaggccttcttgcactcgagaataaacgcggtgcgggtgccggccagtgcgtcatagaaattgcgctgcgtcggaacgatctcattttgaaaactggctaacggttgttgttgtttgcgggcttccacccaaatcgctttgtcggcaacgatttttgctaaaacggtttgcattatttaccctcttgccgctaaggcggtcactctgtcataggccgcgccgctgtgcagcacattcagtacctgctgagcgttagctttcagatcttcatgcccgtgtaaacgcatcaacatggcgacgttggcggcgacggcggcttcgtgagcggcttcacctttaccttgtagcaagcgcgtcagaatgtcacggttttcttccggggtgccgcccgccagctgcgcctgatggtaaggcgtcaggccgaagtcgtcggcggtcagctgatagcttttaatttccccgttatgcagttcggccaccaccgtaggcgcatgcagtgaaacttcatccatcccaccgctgtgcaccaccgccgcgcgctgataacccagcacgcgcagggtctcggcgatcggcagcaccagttccgggctgtagacgccaatcagcgccagcggcggatgcgccgggttgatcagcggccccagcacgttgaacagggtgcgggtcttcagctgctgacggaccggcatcgcgtggcggaaaccggtgtggtacttcggcgcgaacaggaagcagacgcccagctcatcaagcgcggcgcgggatttatcggcgttcatatcgagattaatgccgaaggccgccagcaggtcagaagagcctgatttactggagacgctgcggttgccgtgtttcgccacttttaacccgcaggccgcagcgacaaaggcgctggcggtggagatattgatgctgttgctgccgtcgccaccggtgccaacgatgtcggcaaacaggtagtccgggcgcgggaacggcgcggcgttttccagcagcgcggtagcggcgccggcaatttcctgcggctgctcgccgcgcactttcatgctgaccagcgcggcggccagttgctcaggcttcacttcgccgcgcacgacggcggagaacagctggtggctctcctgctggctcagggtttccgcctggtacagtttctcaaggatcggctggagggtgttggtatgctccagcttctgcagcgcccaggccagggtctgctccagcagtcgcgcgccctgggtggtgaggatcgattccgggtggaactggaagccgcacacccgatccgcatcgtgacgcaccgccatcaccataccgttgaaattggcgttaatcgtcagcccggcgggaatattgctgccgaccagcgagtggtagcgcgccaccggcagcgggttagccagaccggcaaacatcgcctggccgtcgtgctcaatgctggaggctttgccatggaggatctcccccgcctggccgacatagccgccgtaggcttcgacaatggcctggtggccgaggcagatgccgatgatcggcagcttgccgcgcatacgggtcagcagctccggcatgcagccggcttcgctcggcgtacccgggcccggggagagcatcagcaccgggttgtccatggtgcccagacgctcaatcagcgcctgcgccggaacggagttgcgataaatcactacgttatggccgttggcgcgcagctggtctgccaggttataggtaaaggaatcgatattatcgagcagcagaatgtcagccatcagaaaatctccttcgcgtgatgggcctgggcaatggcgcgcagcaccgcgcgggctttatttcgggtctcatccgcttccgactggggaaccgagtcgagcacaatgccggctccggcctggacggtagcgataccttcctgcacgtaggcggaacggatgacgatgcaggtgtcgaggtcgccgtgggcggtgaaatagcccaccgcgccgccgtagctgccgcggcgtttaccttcggcggcggcaatcagctgcatggcgcggaccttcggcgcgccgctgagggtgcccatattcatgcaggcgcgataggcgtggaggacgtcgagatcctgacgcaattcgcctactacacgggagaccagatgcatcacgaaggagtagcggtcaaccttggttaaatcagcgacatagcggctgcccggggtgcagatgcgcgccaggtcattacgcgccaggtccaccagcatcaggtgttcggaaagctctttatgatcggtgcgcatttccagctcgatgcggctgtcgaggtcgcgatccagcgagccgtcggcgcggcggccgcgtggccgggtgccggcgatggggtagatctcaatctgacggctgacggcatcatacttcagcgagctttccggcgaggcgccgaacagggtgaaatcattgtcctgcataaagaacatgtacgggctggggttgctcttcttcagcacatcataagcggccagcggcgatgggcagggcagcgagaagcggcgggaaggaaccacctggaagatttccccggcgcggatcgcgcgctgcattttgcgcaccaccgcgccgtactcttcatcgctctggtcaacgtcgcagcgcatttcggccacggtggtaaccggtagcggcgccggcggctcgttcagctgctgacgcagctggctcaggcgctgctccaggcgctgtttttcactctccagcggggtgaacaggctggcctgaatgcgggtatgcttggtctgatggtcgatgaccagcagggtttccgccagatagaagcagtagtccgggcaggcggtgtcgctttgcaactggggaagatcttcaaaaccggccaccaggtcataggcgaacaggccgccgaagaacatcgcttcgcgctcgttgtccggaacgctcaccagctcctgcaggagacggaaggcgtcaaacaccgacagtgagcagagacgggcgtcttcatcgagcagggcgctgacggccgggaaggtcaggatgcggccgttgggctggcgctgattgttgatcccggagggcagcgcgccgtccagtagttccagcagcgccgcgccgttggcggagagggcctgaatagtgacagtgtcaccaagggccgtaatgcgcagcgcgctatcgaccagcagcaggctttttaagtcatctttgctgtcgatgtcagcggattccagcagcagcgtcgccggacgggcgccgcacagttggtggaataacgccgtcgggttctcccggtagatggcgtcgctggtgagaagctcgagtgccggtttggatgtttgcattattgttctcgcctgttcgtattatttttgtccaataaaaagcccgctcattggcgggccgggtatctgtatgctgaatgcaaaacgcgatcacgccgcccgtcgtcaggaggtgcgccaccagctgtgcagagtgataaagtgcattttcatcgtgataccccttcatgtgaactttcgtactagttaactagttcaatggaataaagtcaacccttgtttgcagattttctctgcctgtcggtatgataatgcgcttatttacgttgatgtccagcaggagtccttttgagcgacagccaatacgcagtgatttacgatctgcacagccataccaccgcctctgacgggcggctgactccgcaggaactggtccatcgcgcccatgagatgcgcgtcggcaccctggcgatcaccgaccatgacagcgtggcggcgatcccggcggcccgggaggagatcgcccgcgccggattacccttgaccctggtgaacggcgtcgagatttccaccctctgggagaatcacgagattcatattgtgggtctgaatattgatattgcgcacccaacgatgaccgccctgctggaggagcagaaagcgcggcgccagcagcgcggtcagatgattgccgagcgcctggagaaggcgcggatccccggcgcctgggaaggggcgctgcgactggcggacggtggcgccgtcacccgcggccattttgcccgttttctggtggaggccggccatgcgaaaaacatggcggaagtcttcaaaaaataccttgcccgcgggaaaaccggttacgtgccgccgcagtggtgtacaataaaacaagcgattgatgtgattcatcattctggcggcaaggcggtgattgcccatcccgggcgctacgatctttccgccaagtggttgaagcggctgttggcccactttagcgagcagggcggtgatgccatggaagtggcccagtgtcagcaggcgccccatgaacgcgcccagctggccaccctggccgtgcagtttggtcttctggcgtcgcagggatccgattttcatcagccctgcgcgtggatcgaacttggccgtaagctctggcttcctgccggcgtggaaggcgtctggcacagttgggaagcggccgccgaataaaaattgagagggaagtatgagccagtttttttatatccatccggataacccgcaggcgcggttgattaaccaggcggtggagattgtgcgtaagggcggggtgatcgtttatcctaccgactccggctacgcgctgggctgcaaaattgaagacaagggggcgatggagcggatctgccgcattcgtcagctgccggacggccacaactttaccctgatgtgccgcgatctgtccgagctgtcaacctacgcttttgtggataatgtggcgtttcgcctgatgaaaaacaacacgccgggcaactatacctttatccttaaggggaccaaagaggtgccgcgtcggctgctgcaggagaagcgtaaaaccatcggcatgcgcgtcccgtctaaccccatcgctcaggcgttgctcgagaccttaggcgagccgatgctctctacgtcgctgatgctgcccggcagcgactttaccgaatccgacccggaagagatcaaagatcgtctggagaaagtggtggacctcatcattcacggcggtttccttgggcagcagccgaccacggttatcgatctcactgaagacaccccggtggtgctgcgcgaaggcgtcggcgacgtgaggccgtttctctaaggctatctgccgggcggtgcatcatgcgccgtccggtaccccgcgttttcgccccgacggcacgataatcatccatagcgctacacaaaccagcagcgcgccgagaatcaatccttcctccaccgtctctccgaggcagagatagccccacagcgccgcaaaaggtgggatcaaaaaggtcaccgacagcgaacgcagcggccctatatctgcaatcaagcggaagtagagaatataccctgccgccgtgcagaccacgcccagcatgactatcgctatccacggcagactctgccgccagtctacggcaggcccatgccagcaggaccagagaaagaaaggaaacagaaacagcgtggcgccgacctggctacccagcgcgacgcgttcagcctcgaggccgcctcgctgctggatccagcggcgggtcagaaagccggccagaccgtaacaggcggtcgcggtcaggcaggcgccaatccccggcagcagcagggcggcgctaaggccagatgtcgggcgcgcgatcaccgccacgccaatggtgcccagtatcgcgccgccgcctttgcgcagggttaacggttctgcaaagcataacgcgccgatcagcacccccatcatcggcgccgtggcgttaagcgtggcggagtaccctgccggcagccattgcgcggcaaggcagtacatgagaaaaggaaggcctgaattaatgacccccagctgcagagtggatgtgaattttccctgatacccgctccatttacgctgcacgccgagtaacagaccgagcgcgatagcggcgaacagtacgcgaagaaaagcgctgttcaacgccccgaaggccggggtggtgatgcgcataaacaaaaagctggcgccccagagggcggcgagcagcagcaggcggccatagtcgataacacgcatgattgactccttgtagtcacgaaggaagtcaactgtagaacccacgtgcagcgtgcgacaaacgcgttatgcttacatgattaagtttttcttaactgaggttccatacccatgaaactcccgccgctgaatgcgttgcgctgctttgaggcggcggcgcgactgcttagcctgaaactggccgccagtgagctttgcgtcacgcccagcgccgtcagccagcagattgcccgccttgaggagacgctgaatgtcccgctatttatccgtactccgcgacggttacagttaacggcggtgggagagatctacctgcgggccgttcagccggcgtttcatcagatagccgccgccacccagcgtctgcaggtgcccccgggaccagaaaaggtagctatcagctgtaccagcggcttcgccattcagtggctgctgccgcggctggctgattttgaacgacgctatccgcagatagagatccagatcggcaccaccaaccggcgagtagatttgctgagtgaagggatcgattttgccgtgcgtcatggtgtcggcggctggccggaactgcaggcttaccgcctgctggatgacgatctgatgccggtctgtagcccgcaactgatcgctccgcgccggacgctcaccgatgcgagcgatctactgcagtatccgctgctgcacgatgaacatcgtgaagactgggcgctgtggtgtgaggccgtggggctggcgccgcacttcgcgcggcgtgggccggtgttcactgattccaacggcgtgacggaggcggcgttcgccggtatggggatggcgttgctgcgacgctcattcatagcgcctgcgctgacgcaggggcggctggttaatcctctggcgcagcccatcgcctgtccgctggcctatcatctggtttaccacgagaccgcgctgctggcgcctgccaaccgctgttttcgcgactggctgcttggccagcgcccggccgttgctgaggagcgcgcgtaatgaggggggcgctgtccgataaagatccgtatgcgtgaatgggcacaggagaatgaggaaaatctgttccatactaaagacggggcgcggcgaacagaagctttcccgacgaagttagtgtagtatgttcggccacgaatacgggctcgcggtggatatcctgaacgcgccgacgagactttacgttaaaagtatatacgtaacaatgagttgtgcttatggcctcattgtttcataaagcataccagacgcctgggaaggcgacaccttaaggaagctcaatgagcgagaaactgcaaaaagtgctggcccgtgccggccacggctcccgccgtgaaattgaagcgaaaatcgaagctggccgcgtcagcgtcgacggcaaaatcgccaccctcggcgatcgtgtggaaattgtccctggtttaaaaattcgtatcgatggtcatctgatctcggtgaaagagtctgccgagcagatctgccgcgtgctggcttactataagccggaaggcgagctgtgcacccgtaacgatccggaaggacgcccgacggtatttgatcgtctgcctaaactgcgcggcgcgcgctggattgccgttggtcgtctggacgtgaatacctgcggcctgctgctgttcaccaccgatggcgaactggccaaccgcctgatgcacccgagccgtgaagtcgagcgtgagtacgccgttcgcgttttcggccaggtggatgatgataagctgcgccagctgtcgcgcggcgtacagttagaagatggtccggcagcgtttaaaaccatcaaattcaccggcggcgaagggattaaccagtggtataacgttaccctgaccgaagggcgtaaccgcgaagtgcgtcgcctgtgggaagcggtcggcgtgcaggtcagccgtctgatccgcgtgcgctacggcgatattctgctgccgaaaggcctgccgcgcggcggctataccgagctggacctggcgcagaccaactacctgcgcgagctggtggagctcacgccggaaaccagctctaaggttgccgtcgagaaagaccgtcggcggttgaaagccaatcagatccgtcgggcggtgaagcgtcacagccagaccagcgctaatccgcgccagggtaacaacagcaaccgtcgttccagtactcgcaataagactaacggttaatgttatgcgttccggtgacttgccgccggaacgcttacttccttccgcgctatcaggccctcagtagtctatccccatctgcgctttaatcccggcatcaaatgcatgcttgaccggacgcagttcgctgacggtatcggccagttcaataatatcgcgatgacagccgcggccggtgatgatcaccgactgatgggcagggcgctcacgcagggcgctcagcaccgactccagcggcaggtaatcatacgccaccatgtaggtcagctcgtccagcagcaccagatcgagctggtcgtcagcgagcatacggcgggcatgctcccagaccgccaggcaggcggcggtgtcgctgtcgcgatcctgggtgttccaggtgaagccggtggccatcacctgaaattcgacgccgtgaggctccagcagattacgctcgccgttaggccaggtccccttgataaactggatcacgccgacttttttgccatggccgacggcgcgggtcgcggtgccaaaggcggcggtggttttgcctttgccgttgccggtaaagaccatcacaatgccgcgctcgtcctgggccgccgccacccgggcgtcaactttatctttcagccgctgctggcgttcgcggtagcgttcatcactcattgggcaattcctggtttacgtcccggttgggcgtcgaaggtcattcccgtcttgcgacgactgtcgtcacccatcagccacagatagacgggcataatgtcagcgggggttttcagtttcagcggatcttccgtcgggaacgcgctggcgcgcattccggtgcgagtgccgccggggttgatacagtttacccgcaggtggcggctttgatactcgtcggccagcacctgcatcatcccttcggtggcgaatttggaaacggcataggcgccccagttggcgcggccctgacgaccgacgctggatgaggtgaagaccagcgagcccgattccgaacggagtaataaaggaagaagcgcctgggtcagcataaaggtgccattaacgttcacctgcatcacctgctgccagacctccggcttctgctcttccattgggcagatgtcgccgagcaggccagcgttatgcagcacgccgtcaaggcggggatagtgcatgctgatctgctgcgccagctgctggcacgcctggggcgtacaggtgagcaggtcgagggtaaaccagcgagggggaataccaccctcacgctcaatctcctgggcgacggtgcgcagtttgtcgtcgttgcgacccagcaggataacgctggcgctatagcgcgcgtaggtcagggccgcttcacgaccaatcccgtcgctggccccggtgaccaggatgatgcgatctttcagcaagtgacgttgtggttgataatgcacggcaactccttgggcgatcggttcccgatcgcgcttcatctttggtatctcacttttgcgctgttatgcctgaaagcgcccgccattgcaatcggcgaagcggaaagtattcacaaaattaatatcttgcaacgatttcagccgcgcgaaaaaaaacggaatccgctgcgcagagaacacaaagcacaaagacttctcgccagcggctgaggtacactgtgcagcaacgtcagtgctttacacaaggtgaaaacgtggaattacttgctcagtacggcttatttttagccaagatcgcgacggttgtcgtcgccatcgcggtgattgccgctattatcgtcaacctcgctcagcgcaagaagcagcgcggcgagctgcgggtgaccaatcttagcgagcattataaagagatgaaggaatcgctggcggtggcgctgctggacggcccgcagcagaagcagtggcataaggcgcagaagaaaaagcaaaaacaagaggcgaaggcggccaaagcgcgggcgaagctgggtaatgccgagccggaaggcaagccgcgcgcctgggtgctggatttcaaaggcagtatggatgcccatgaggtcaatagcctgcgggaagagatcaccgcggtactggcggcggcgaaagcgcgcgatcaggtggtgattcgcctggaaagccccggcggggtggtgcacggctacggtctggccgcctctcagctgcagcgcttgcgcgacaagcagatcccgctgacggtggcggtcgacaaagtggcggccagcggcggctatatgatggcctgcgtggcgaacaaaattgtctcggcgccgtttgcgatccttggctctattggcgtggtggcgcagatcccgaacctgcaccgcttcctgaagaataaagatatcgatatcgaactgcacaccgccgggcagtacaaacgaacgctcaccatgctgggcgaaaataccgaggaagggcggcgcaagttccgcgaggatcttaatgagacacatcatttgttcaaggatttcgtccaccggatgcgtccgggacttgatattgagcaggtagctaccggcgaacactggtacggggtgcaggcgctggaaaaaggtctggtggatgcggttgaaaccagcgatgagctgctgctggggctgatggagagccacgaggtgatcggggtgcgttatcaacagcgtaagaagatgctcgaccgctttaccggtagcgcggcggagagcgccgatcggcttctgctgcgctggtggcagcgcggtcagaaaccgctgatgtaaataacataacgcgaggcctgggcctcgcgttattgttttcactggtcttaatcgaccaggtggtacttgtccgacagctcgtgagcaagatacttaaacatgttaaataccgctgtactcttcggcgtcggtagtccctgctcatcaaggtaaaactcaccgctaaacaccaggacattgttgcgctgaacgacgtcggtggcttcgataccggctaacgtatcctcatgttcgcgaataagtttgttggctttttcgagcagcgtctggcgatcgattggttgggttgtaccttgcataacggactcctctttttctccgcgcgtagtttacgccgcgcggcggcgtggggcaaattttccatgcataaatcaggggtaatggtaaccagtggagaaacagccgtttactggcgggatttgcttttgcatgctaataaagttgcgtaacgaattttatcaggtacagtgtgacgctttcggcgatctggcaacagatttgcttgacattcggccaaaaattcttcgtgctatgtcacctgacgagaaaaagtcagcaaactcaagcgcctggttttacggagatgaaacgggtgttcagggttgatattcaccgacggtgccgcaacatatgaggcagtcgccagtggagggtgtatgaatgtgcgatgtattcctggatgaatcaaattaggtaaaggtgaatatgggtaaagctctcgttatcgttgagtccccggcaaaagccaaaacgatcaataagtatctgggtaatgactacgtggtgaaatccagcgtcggtcatatccgcgatttgccgaccagtggatcagcttccaaaaagagcgccgactctaccgccaccaaaggggctaaaaagcctaaaaaggacgaacgtagtgctctggttaaccgtatgggcgtggacccatggcatgactggaatgcgcactatgaagtacttccgggtaaagaaaaggtagtttcagaactcaaacagttggcggaaaaagctgaccacatctatctcgcaaccgaccttgaccgcgaaggggaagccattgcctggcacctgcgggaagtcatcggcggcgatgaacagcgttacagccgcgtggtgttcaatgagatcaccaaaaacgctattcgtcaggcctttgaaaagccgggcgaactgaatatcgatcgggttaacgcccagcaggcgcgtcgttttatggaccgcgtggtgggctatatggtttcgccgctgctgtggaaaaaaatcgcccgtggtctgtctgccgggcgcgtgcagtccgtcgcggtccgcctggtggtggagcgtgaacgtgaaattaaagcgttcgtcccggaagagtactgggaagtcgatgccagcaccaccacgccaggaggtgacgccctgccgctgcaggtgacccataaggacgataagccgttccgtccggtcagccgcgatgagaccatggcggcggtatcgctgctggaaaaagccagctacagcgtactggagcgtgaagataagccgaccagcagcaagccgggcgcgccgttcatcacctccaccctgcagcaggcggccagcacccgtctgggcttcggcgtgaaaaagaccatgatgatggctcagcgactctatgaggcagggcacatcacctatatgcgtaccgactccaccaacctgagtcaggacgcgctgaacatggttcgcggctacatcagcgacaaatttggcaaaaaatatctgccggatagcgcgaaccagtacgccagcaaagaaaactcgcaggaagcgcacgaagcgattcgtccgtctgatgtgaatgtgctggcggaaacgctgaaagatatggaagcggatgcgcagaagctttatcagctgatctggcgccagtttgtcgcctgtcagatgacgccggcgcagtacgactccaccacgctgaccgtggctgcgggtgatttcaaactgaaagcgcgcggtcgcactttacgtttcgacggctggacaaaagtcatgccggcgctgcgcaagggcgatgaagaccggacgctgccgctggtcaaacagggcgaccgcctgagcctggtggagctgacgcctgcgcagcactttaccaagccgccggcgcgtttcagcgaggcctcgctggtgaaagagctggaaaaacgcgggattggccgtccgtcgacctacgcgtcgatcatttcgaccattcaggatcgcggctacgtgcgggtggaaaatcgtcgtttttacgccgaaaaaatgggcgagatcgttaccgaccggctggaagaaaacttccgcgatctgatgaactacgattttaccgcgcagatggaggatcgcctcgaccaggttgcgaaccaccaggccgagtggaaagaggtgctgaaccacttcttcggcgattttaccacccagctggcgacggcagagaaagatccggaagagggcggcatgcagccgaacccgatggtgctcaccagcatcgactgcccgacctgcggccgtaaaatggggatccgtaccgccagcaccggcgttttcctcggctgttcgggctatgccttgccgccgaaagagcggtgcaaaaccaccatcaacctggtgccggagaacgaagtcctcaacgtgctggaaggcgatgacgcggaaaccaacgcgctgcgcgccaaacgtcgctgccagaagtgtgggacggcgatggacagctaccttatcgatcctaagcgtaagctgcatgtctgtggtaataacccgacctgcgacggctacgagattgaagagggcgaattccgcatcaagggctatgacggcccggtggtggagtgcgagaagtgcgggtctgaaatgcacctgaaaatggggcgtttcggtaaatacatggcctgtaccaacgacgagtgtaagaacacgcgtaagatcctgcgcaatggcgaagtggctccgccgaaggaagatccggtgccgctgccggagctgccgtgtgagaagtctgacgcctactttgtgctgcgcgacggggcggcgggcgtcttcctggcggccaacaccttcccgaaatcacgggaaacgcgtgcgccgctggtggaggaactgtaccgcttccgcgatcgtctgccggaaaaactgcgttatctcgccgatgcgccgcagcaggatccggaaggcaataaaacgctggtacgctttagccgtaaaaccaagcagcagtacgtggcgtccgaaaaagagggcaaagcgaccggctggtcagctttctttatcgacggtaagtggacggaagccaaaaagtaatggcgttcgttcgggcaggaaaagcgcgcttttcctgctcaggcgaccggcagagagagtgcatttctctgccgtgtcgtcttcccctctttgcgttaatttcctccccttataaccacctatattatttttcgttagcgtctatacagtgttgatataaatgatatagtggttatagttaatgccttttttattattaaaacgtcttatacatcatcgctttcaggatgcattgcggcgccactatggccaactgccgggagcccagggccttcatcggcgacaagttgcctgaacgtaaagtgtattaagcggcttcattttacgcgcaaacggatatcagccatgaaactacaacagcttcgctacatcgttgaggtggttaaccataacctgaatgtttcatccaccgccgaagggctctatacctcccagccgggtatcagtaagcaggtccgcatgctggaggatgagctgggcattcagatctttgcccgcagcggtaaacacttaacccaggtgacgccggccgggcaggagatcatccgcatcgcccgcgaagtgctgtcgaaagtcgatgccatcaaatctgtcgccggagagcatacctggcctgacaaagggtctctttacgtcgccaccacccatacccaggcgcgctatgcgttaccgggagtgatcaaggggtttattgaacgctacccgcgggtgtcgctgcatatgcatcagggctcgccgactcagattgcggaggctgtgtcgaaaggcaatgccgatttcgccatcgccaccgaggcgctgcatctgtatgacgatctggtgatgctgccatgctatcactggaaccggtcgattgtagtgacccccgagcatcctctggccaccaagggctcggtgtccatagaggaactggcccagtatccattggtaacctatacctttggttttaccggccgctccgaactggataccgcgtttaaccgtgcgggcctgacgccgcgcattgtttttaccgccaccgatgccgacgtcatcaaaacctatgttcgcctggggctgggggtaggggtaatcgccagcatggcggtggatccggtctctgacccggatctggtgaagctggatgcgaacggtattttcagccacagcaccactaagataggtttccgccgtagcaccttcttacgaagctacatgtatgattttattcaacgttttgctccccatttgaccagggacgtggtagataccgcggtggctttacgctcgaatgaagatattgaagcgatgttcaaagatataaaacttccggaaaaataaccctgaaaataataatggcactccctgcgaggagtgccattaactatgatggactgtatttaacaacttaaacctcgaaccaatcacaaaattaataatttttggcaacacgtttttcattatgcccgccgcgatcaaataaccggttaaatatattccatcaggcctaaattcactggattaatcttttatccataattaagatttatctgtacctgatgatttgagcaattggtggtgacaatatgataagtaatatcgattacatgaaactggcgatgtcatacgagaatgacaaaaccgaaatcgatcccgttctgcgtagtcgcgtatggggcgtagtgttggtagggttggcgatgttctggagcatcatcgcgctcaccatctgcaacatctggattgtcagctaaagctgtaggtcatcgttgtagatacatgtcatttttatgacagtgaaaagaaactgtaatataaaatcagtgaccggcaatacagggagaatatattttgccgctggattcatccaacctgaaatcactcatcagagctaatcactgcccgctggccgattagctctttttttgtcctcgtgtactaatacaatatcggcatacgccctctttgcactattttggtgctatttcgcctgctctcggataattcccgtttcctctctctctgtctcgccgtatttagcaatttgggttgttatcaaagtgttatgctcagtatgtgttatctttaatggagaccctgaggagaatcagggtatgccatccctgagataaaggaggagctatgtcgtcaaccctacgagaagccagtaaggacacgctgcaggtcaacgataaaacctggcattactacagtctgccgttggcggagaagcagctgggcgagatcagtcgactgcccaagtcgctgaaggtgctgatggagaacctgctgcgctggcaggacggtgactcggtaactgaagaagatattcgcgccctggccggctggctgcaacaggcccatgccgaccgggaaatcgcctaccgtccggcacgcgtcctgatgcaggactttaccggcgtgccggcggtagtggatctggccgccatgcgcgaggcggtgaaacgccttggcggcgatacggcgaaggttaatccgctatcgccggttgacctggttatcgaccactcggtgaccgttgaccgcttcggcgacgacgaggccttcgaagacaacgtccgcctggaaatggagcggaaccacgaacgctacgcttttctgcgctgggggcagcaggccttcagccgcttcagcgtggtgccgccgggcaccggtatttgccaccaggtgaacctggaatacctcggccgggcggtctggagcgaggaggtgaacggccagtggatggcgtggccggatacgctggtgggcaccgactcccataccaccatgattaatggtcttggcgtgctgggctggggcgtgggcgggattgaagcggaagccgctatgctgggccagccggtgtcaatgctgatccccgatgttgtgggctttaagctcagcggcaaactgcgcgaaggcatcaccgccactgacctggtactgacggttacccaaatgctgcgtcagcatggcgtcgtcggcaagtttgttgaattctacggtgacggcctggataccttaccccttgccgacagggcgaccatcgccaatatggcgccggagtatggcgccacctgtggctttttccctatcgatgacgtaacgctcagctatatgcgtctcagcggccgtagcgaagaacaggtcgcgctggtggaagcctacgctaaagcccagggcatgtggcgccagcctggcgatgagccggtctttaccagtaccctggcgctggatatgagcagcgtcgaagcgagcctcgccgggccgaagcgaccgcaggatcgcgtggcgctgggcgatgttccgaaagccttcgccgccagcggcgagctggaggttaaccaccttcagcgtcagcgtcagccggttgactatacgctgaacgggcatcactattcgctaccggatggcgcggtggctattgcagcgattacctcctgcaccaatacctctaaccccagcgtgttgatggccgccggcctgctggcgaaaaaagccgtcgaacgcggcctgcagccgcagccgtgggtgaaagcttccctggccccaggctcgaaagtggtgtcggattatctggcccatgccggcctgacgccttacctcgaccagctcggcttcaatctggtgggatatggttgcaccacctgtatcggtaactccggtccattgcctgaacctatcgaagaagcgatcaaaaaaggcgatctgaccgtcggggcagtgctctccggtaaccgtaacttcgaagggcgtattcatccgctggtgaaaaccaactggctggcctcgccgccgttggtggtcgcctattcgctggcggggaacatgaatatcgacctcacccgcgagccgttgggacagggcaagaatggcgagccggtctatctgaaagatatctggccgagcggggaggagattgcccgcgcggtggaacaggtctccaccgagatgttccgcaaagagtacgcagaagtgttttccggcactgaggagtggaaggcgatcaaggtggaggcgtcagatacttacgactggcaggaggattcgacctatattcgcttgtcgccgttctttgacgagatgggcgccgagccgctgccggtagaggatattcgcggcgcgcggatcctcgccatgctgggcgactcagtcaccacggaccacatttcgccggcggggagcatcaaagccgatagtccggcaggccgctatctgcaggagcatggggttgcccggcgcgactttaactcctatggttcccgtcgcggtaaccatgaggtgatgatgcgtggcaccttcgccaatatccgcatccgtaacgaaatggtcccaggggtggaagggggcatgacccgccatctgccggatcctgaaccgatggcgatttacgatgcggcgatgctgtacaaggctgagggcacaccgctggcggtgattgccggtaaggagtatggctcaggttccagccgtgactgggcggcgaaggggccgcgcctgctggggattcgggtagtgatcgccgagtccttcgagcgtatccaccgttccaacctaatcggaatgggcatcttgccgctggagttcccgcagggcgtcacccgcaaaacgctgcggttgaccggggaagagcggattgatatcagcaatctgcagtcgcttcagcctggcgctacggtgccggtgaccctgactcgcgctgacggctcgcaggaagcgatcccttgtcggtgccgtatcgacacggcgaccgaactcacctactaccgcaacgacggcatcctgcactacgttattcgtaatatgctgtgaaacaaagggccagcatcgctggccctttttcggttattccaccagtttattccgtcggcttgctgttcagcagatggcccatcttggcggctttggtgtccagatagtgagcgtttttcgggttacgcccgacgatcagcggcacccgctccacaatgttgatcccggcttcggtaagaatttccacttttttcgggttattggttaataaccgcacctgctcaacgttgagcaatttgaacatgtcggcgcacaaggtgaaatcgcgctcatcggcggcaaagccaagctgatggttcgcttcgacagtgtcgtagccctgatcctgcagcgcgtaggcgcggatcttattcaataaaccaatgttgcgtccttcctggcggtgatacagcaggatcccccgaccttcttcagcgatatgcgacagagccgcttccagttgaaagccgcaatcacagcgcaggctaaacagggcatcgcccgtcaaacactctgaatgtacgcgggcgaggaccggcgactgccctgatatatcgccatataccagcgcgacatgatcctgtccggttgccagttcttcaaaacccaccatcaggaaatcgccccagggggttggcagtttggcttctgccacacgtttaagctgcatgtgattctccagattctgtcagcacctgactgtgctttctgtttcccgctattttgccacaacgcctggacgttctcctaatcgcgaacggttagccgtgtggaaagcgcacaaacgatctactttccgctatgatgttcatctacaaggagaaggagagaaaatgctgttgatagcccgacgaactgctctcgcggcggcgctgctgctggttatgcccctcacggtctggctttccgggtggctgtggcagcctggactgccggttgccatgttgaaaagcctgtggtgggtgacggaaacggtgacccagccgtggggaattatcactcatgtcgtgctttgcggctggttcctctggtgtctgcgctttcggctgcgcgcggcgttgatcctgttccttatccttgccgccgctatcctggcgggacagggggcgaaatcctgggtcaaggcgcgggtccaggagccgagaccgttcgtcatctggctggaaaacacaaggcaggtgccggtgacgcaattctacgcgttaaagcgtaaagaacgcgctaaactggtgcatgaacagctggcgcaggcgcaggacattccgtcatttttacgcaaacactggcagaaggagacggggtttgctttcccgtcaggtcacaccatgtttgccgccagctgggcgttactcgctgcggggctgctgtggccgcgtcgccgctggggcacaatcgcggtgctgctggtgtgggcgacggcggtgatgggcagtcgcctggcgctgggcatgcactggccgctggatctcatcgtcgccacgctgatctcctggctgctggtcacggtggcctgctggctgacgcagcgcctttgtgggccgctctcgccgcccggagaagaggcgcaggatattaaaaaacggatgcctgaagcggaataatgttgattttagcggcatccgaccgcatatcctgaagagttgccatgctttttcattccaccgctgcggcgaaaatgatactttatagggctgaaagcgggcttttttcgcgcaacccacataacgggaagtcatgtgaaatatttactcattttcttactggtgttagcaatcttcgtcatttcagtgacgctggggcgcagaatgaccaacaggtcactttcaactatttactcgctcagggtgaattccgcatatcgacgctgctggcggtgctgtttgccgcgggctttgccattggctggctgatctgcggcctgttctggctgcgggtgcgtgtctcactggcgcgcgcggagcggaaaattaagcgtcttgagcatcagattgcccccgtcagcccggcggctgtcgacgcaggcgtgcctgcggtgaaggaataacctcttatgctggagttgttgtttctgcttttacccgttgctgccgcttacggctggtacatggggcgcagaagtgcacaacagtccaaacaggacgatgcgagccgcctgtcgcgagattacgtggcgggggttaacttcctgctcagcaaccagcaggataaagccgtcgacctgttccttgatatgctgaaagaggataccggtaccgttgaggcgcacctgacgctcggtaatttgttccgttcgcgcggcgaagtcgaccgcgcgatccgaattcaccagagcctgatggaaagcgcgtcgttaacctacgatcagcgcctgttagcggtgcagcagctgggacgggattatatggccgccggactgtatgaccgcgcggaagacatgttcaaacagctggtggatgagaccgatttccgcctcggcgcgctgcagcaactgctgcagatttaccaggcgaccagcgactggcagtcggctattgaagtggctgaacggctggtgaagctggggaaagagaaacatcgtggcgaaatcgccaacttctggtgcgaactggccctgcagcagatggcagccaacgatctggataaagcgatggcgttgttgagaaaaggcgccgccgcggaccgcaacagcgcccgggtatcgatcatgatgggccgggtgtggatggaaaagggcgactacgccaaagcggtggagagcctcgagcgggttatcgatcaggataaagagctggtgggtgaaacgctggagatgctgcagacctgctaccagcagctcggcaaaaccgatgaatgggaagtttttctgcgccgctgcgtggaggagaacgccggggcgaccgccgaactgatgctggcgcagatccttgagcagcgggaaggcgtcgaagcggcgcaaaactacgtcacccggcagctggaacgccacccaaccatgcgcgtcttccataagctgatggactaccatctcaacgaagcggaagaagggcgggcgaaagaaagccttggggtgctgcgaaacatggttggtgagcaggtgcgcagcaaaccacgctatcgctgccagaaatgcgggtttaccgctcatacactctactggcattgtccgtcctgccgctcgtgggcgaccattaaacccattcgcggtctcgacggccagtaaagccaaaaaaaagccctccattagttacaacatacttatcgcttcactcctctccaggcgcggcctcggcagcgccatcgtccggtcagggcaggtacggcagtctgttattttgttcgcttcacaggtagaatgctgcccgtttaccttttttgcgccaccccggcgcccatcaacactaaggtctggtcatgacgtctacagctatcccatcttcccgcgctgtcacatcctctcccgttgtggttgcgctcgactatgataatcgcgataaagcgctggcatttgtcgaccgcatcgacccgcgcgactgccgcctgaaggtgggcaaagagatgttcaccctgctgggcccgcagtttgtccgcgatctgcatcagcgtgggtttgaggtgttcctggaccttaagtttcacgatattcccaacaccaccgcccgcgcggtggccgcagcggctgagctgggcgtatggatggtgaatgtccatgcttccggcggcgcgcgaatgatgaccgccgcgcgcgaagcgctgctgccgtttggcaaagatgtgccgctgctgatcgctgtcacggtactcaccagcatggagtccagcgatctacaggatctgggcattaccttatctccggctgactacgcggcgaagctggcggcgctgacccaacgctgcggccttgatggggtggtgtgttcagcccaggaggcggtgcgctttaagcatgagctggggcaggcgtttaagctggtgaccccggggattcgtccgcagggcagcgacgctggcgatcagcggcgaattatgactcctgagcaggctcaggaagctggggtagactatatggtgattggtcgcccggttactcagtcggcggatccagccgcgacgctgcgggcgatcaacgattctctgcgcaagggggcataatgagcgattccaacagccgtctggtctactccaccgaaaccgggcgtatcgacgaggcgaaaccggcgccggtgcgcccgaaaggcgacggcattgtgcggatccagcgccagaccagcggccgcaagggcaaaggcgtctgtctgattagcgggattgatgccgatgatgctgcgctaaccgctctggcggcagagttgaaaaagaagtgcggctgcggcggcgcggtgaaagacggcgtgatcgagatccagggcgataagcgggatttactcaagtcgctgcttgaggcgaaagggatgaaggtcaagttagccggtggctgatcgctattttccctctgctccagtggtctggttgaaataacaaggccgcggtaaatgccgcggccttgaatgatttaacgtgcgtaagtcaattcgtgtgaattattcttttatttcgtcagataattaaattatttgccgacctggtgaccaataataccaccgactgctgcgccacccagggtaccgagcgcgctaccgtcagttaacaccgcaccaccgatagcgccggcgccagcgccgatagccgtgttacgatcgcgtttagacatgttagagcaagcgctcagagacattgctacagtgacagccagaacgacagcagccatttttttgctcgttgaagtcatcattttttttctcctgaataatctattcatggattacagcgctcctctaagcatagcctgataaagcagctttagggcaattccatgaagttaaggtgcgcaggtgtcacgaaaatcacgcaggtgatagtcacttcctgttatatcgctaataataattttactttttttaaaatttatcgtcaggtaaaaagtcttaattagcggctcggaatactctcagagcgataaagcgccccttccggcgctttggcaggagatggggcggcggaggatcagatgtagggcacgatatcgacggtcaggccgctgcggagcaattgttcgcgacaggcgtccggtaagcgatcgtcggtaataacgcgattaaagcggccggcgggaccgagcggatagggatgtaccgcgctgaattttgaactgtcgctaagaataattgcctcacaatgcttctccagcacggcgttcaccacgtccgcacgcatcatatcgcggccggtaaagccggtttccgcctgccaaccgtcgatcccgatgaaggctttgctgaaatgcacctgctggatgaactgacgggttagcggaccgaccatactctcactgcgtttctgataaattccgcccagcaggatcacctctcctggggtctctttcagcagatgggcgatatagctgctgacggtaatgatggtgatatcgccgcgctcggccagcgtacgcgccagcagggcattgctgctgccgttttcgataaataccgtttcaccggtattcactagcgccgcagcccggctggccagctcacgcttaatggcgaaatgggtcatcatgcgggtttcgacatcttcgctgtccagcggtacggcatagccatgagtacggcgcaaatagctctgcttttccagcaaattcaaatcctgacgaatagtaacctcagagacaccggtcatcttcgccagatcggcgacgctcatgcggcctttatcgatgaccacttgcaaaatactttgttgtcgggcgttcatagcaacatcactgttagggggctatatggcgagcaaccggtccatatggccggctgcggcatggctgatattcagatttcccagggcgccttgggttggttttgttgttcagcatcgtccgccgccagcgccagcagctccgctttgaggatctccagattatggatcgcagaatggtaatcaccggcaaccagaatatccagcacggtatcgatacgttgagcgagcaggtgggcattcacatctgacatggcattatcctggtaacaaaaacgaatgaaatcaatgatgctaaaaatgaatgaaaaagagaagcgaaaaaaacgcacaaccttaatcggtgcgacggaaatggctggatagagaggaaagaagcagcggttcccgcaggaaccgctgtgaaggggcgtcagaccgccggacgcgcaataatgctgcgggtttccatgcgaacttcagcgatagtgacatcgataacgtcagtcactttatagactacttcacctttgatctgcacggtaccgttctcctggctgcacaccagttcgtcgcgcacggcgtggaggaacggggccggaataaaggcgaccgcgccattgtccaccagacgcacgcgcatcccgccgcggctgacgtcgatgatctccgccgcgaagcgggtatcggtcccggctttatcgttgaggaaacgggcgtacagccagtcggcgacgtcgcgctcggccatccggttgagacgacggcgctccgccatctgcacggtggcttcatcctggggacgcgcaatggtctcgcctttaatgatggctttcagcagacggtggttgatcatgtcgccatacttacggatcggcgaggtccaggtggcataggcttcaagcccaagaccaaagtgcgggcccggctcggtgctgatttccgcaaacgactggaagcggcgaatgcggctgtcgaggaaaccggtcggctgagcgtccagttcccggcgcagcttgcagaacccttccagggtgagtacttccgtcgggtcgacgtgcacatcatgggttttcagcagggcggccaactgctcggtattcgccgggtcgaaaccggtatgaacgttataaacgccgaagccgagcttgtcgcgcagaacgcgggcggcacagatgttggcggcgatcatcgactcttcgacaatgcggttggcaatgcgacgcggttccgcgacgatatccagcacttcccctttttcgccgagaacgaaacggtagtccggacggtctttgaacaccagcgcatgggtctgacgccattcgctacgacgctggcacacgtccttcagcagcgtaatttgctgcgcgatcgcctcgctgtccggctgccagctgccgcggccttccagccagtcagagacgtcgtcataggccagcttggctttcgattcgatggtggcggcaaagaactcgatattgtcttcgatggtgccatcggccccagagtcatccggcaggccagcaccgggcgcacttcgttagcgcgcagggagcagagatcgtccgacagctcgcgcggcagcattggaatgttgaagcccggcagatagttggtaaaggcgcgcacttttgcggcgttatccagcttgctgccttcggcaatccaggcggtcgggtcggcaatggcgaccgtcagcagcagtttgccatcagcagtggactcggcatacaacgcatcgtccatatcttcggtgctggcgctgtcaatggtgacgaagtcgagggtggttaggtcgcggcgcgtcagcccctcgtcgagcatctcggtggcgacgccgtccggtgcctctttctcaagattatggcgcgccagggttacccaccatgggacgaagtggtcgtcgctaaaagtgatgaactgggtcaactccgcgtaaaatccgcggtcgccttttaatggatgacggcgcatctcggcgacggcccagtcaccctgtttaaaatcgtgctcaacgccgcgggcggcgcggcagggaatggcgtctttcagcagcggatggtcaggaacgatagcgaggcgatcgtctttcttctggactttaccgacaaaacgagtcaggaagggctcaaccagcgattccggctcggcgctttcgcgttctttttcagaatggatcaccgcgacgatacggtcgccatgcatcacttttttcatctgcggcggcggaatgaagtagctcttctgagcgtccacttcgaggaagccaaagcccttttccgtgcccttaacgaccccttccgcgcgcggcgtctgggaatgcagttgctgtttaagctgcgctagcagcgggttatcctgaaacataattaggtattttcgtggctaaaagagcggctgacatttttacgcgaatatgcctgccgcagcaagcgctgtttcagcaatttacgtctgctgacgcacattgccgagggcgattttcagacgattcatccatccgcacagcccgctccagatcaacagatcgattgcttgttgcgcagagagtcgatattccgcgaggggcgttaactgggcggcgctaaaacggtcaggcgagcgggttaacagctgcaccgcggtcacgagagaccgggcctgaggatgctgctggagccagtgatggagggcctggtcgccctcccgcaaatggctggcgaactcctcttcaccctgccagtgggggagccaggcgtcaaaacaggtggggctgccattggtgcgcgccgtgagtaaggcgacctgcgggccaaaggtatcatccgtgctgagctggcggatcaaggtctccagaggcgcgaataactgtgggtcgcaggccagcagcggcgccagctcgcccagaccgggcagcgactgccagccggcgatgcgccgctgacgctcatcatcggcatactgcaggtcgggatccgcaatgtctgcctgccatgctcccggcggcggggcgaacagttccgcgggtgcctcctcttgctggggcataccggggatccagcgcaccggaaagccctgggccgcctgcaggacggcaatcgcccgcgcctggaagccgacgaatccgataatctggttgaacagaataatgtcccgactggttaagcccacttcgtccagctggctacgggagagagcgttaataaccgagggcgaaccggcaagctgacgagcatattgcgtgatttgcgccagacgacggttgctctcgcgcgaggagtcggggcctggcaggggagcaaggcgggcggcgtagtggttacacagccgctggacgccgtagacctgggcgacggtgagcgcggtgctgagtcgatcgtaagcggtaaaggtctgcaggcgactcaccgccacctggtcgggaaatagcagttcggccagctggcgtgcggggtgtagccagtcagcgtgggcacttagccaggcggccggcagcgtcaggtccagcaaaaagcggtcttcaacatgggcggcttcagggacgagcggcaggacatccaccgggcagattgttgactgggtttcgtgataccagtgatttttgccattcacgcggcgtggctccatgggctttccttgttcggtatgtggcgaaccgccgttccgcggatcgtttatgcagaactatcctggcgtaacccggaagcaggagaaaatattgatacgtgctaacaaatagccgattggaataacaggtggggtgtaaggcgtgggggagggaagaaccctcctcaccggggcgaggaggggaaggaacttatttcagttccagctcgttcatggcggcgatattgaacccgccgtcaacgtgaacgacttcaccggagatccccgcagacaggttggagcacaggaaggctgcgctgttacccacatcttcaatggtgacggtgcgacggatcggggtgaccgcttcgcagtgcgccagcattttacggaaatctttaataccggacgcggccagcgtacggataggaccggcagagatggcattgacgcgaacgccttccggacccatggcgttagccatatagcggacgttagcttccagagaggctttggccagacccatcacgttatagttcgggatcgcgcgctctgcgcccaggtaggagagcgtcagcagagccgaacccgggttcagcatgccgcggcaggctttggccattgccacgaagctgtaagcgctgatgtcgtgcgcgattttaaagccgtcgcgagtgacaacgtcaacgtagtcgccgtctaactggtcagccggggcaaaaccgattgagtggacgaaaccatcgaattttggccagactttttccagctcggtgaacagcgcggtgatgctctcatcttcagcaacgtcgcacggcagcacaatgtcagaacccagcgcggcagcaaactcttctacgcgacctttcagtttctcattctgataggtgaatgccagttccgcgccttcgcggtgcattgcctgcgcgatgccgtaggcgatggacagtttgctggcgacgccagtgatcaaaatgcgcttaccggaaagaaaacccatagctttaatccttatcgttattgcttatttttactttaacaatcataacgttaacattgttatttcaaaataactcaaatttagccgggaattatatcccactgacgaccccttgtgtcacgatatttttcagccggtccgcgccgcgcggggcaaaagtacatcgcgatagctgcagtatatcatctctcctgacgattatttgagcgcgatctccgccagcagcaggcgtccattgctgcccaggggacgcagattccgcggggatccaccgcgccagcagaggccgctgccggccgcgcagcgtcgcccggccagatcccactcgccttgtagaacataagctaccccctcgctggcagggcattgcaggtcgctaacgacctgaactgtcgccgacgcgcgcccgcgctgagtcatgatattgaagtccagccctggcgcaacgatcccgacgctggacagcgcccattcgccggggaaagcccacggctgccagagcgccagcggttggtcgatattctcgccacacagccgtagcggctgccccgccagcagagtaatgacccggtcgacgccaggaaagggggagaaagggccatccgcctgcagggtggcaatactcgctcgccagagaaaaggggcatctggagcgggtacgcagatgatttcgcgcgtctctccgccaccgtttttccacggcgtgacggggagcgtcgaaagttgaaaagggaccatcatgggcagcataccttagttaatcgcttccggcgtcaacaataagcaccgccttgagctagttcagtaactttctgcagtacaaatattttacatattcgtcacaaaatgagagtgcatgcaaggcggtgagttgtcaatgcttgtatatacaagaacgattgagtgaggtgatattaataacttgagtgaggaacctatgtcttcgttttcgtctacagacgggcagtcaaagagcaattatgctggaatgagtgaaaggcggtcgattgattacatcccggaaagcgaacggcatggacacccttttagccagttcaccctttggtttggcggcaatctgcaaattacggcgattgtcactggcgctttagccgttgtgctgggcggcgatgtagtgtggtctctggtcgggcttctggtcggtcagatgctgggggcggcggtgatgtctctgcatgcgctgcagggaccgcgactgggacttccgcaaatgatccttagccgcgcccagtttggggtttttggcgcggtggtgccgctggtgctggtttgcgtcatgtatatcggtttttctgccagcggcaccgtattggccgggcaggcaatggccaaactactgaatatcagccacgtagccgggatgctgatattcagtgcgattattatcgttatcgccgtcctcggttataaggtgatccacaagctgggcaaactggcgagtatcgtcggaattctcgccttcgtttatatgttcatcacgctgctactttcggccgatctcagtgcgctcgcgcacaataaccatttttcgctgccgacgtttttattagccgtatcgctatcctcatcgtggcagatcgctttttgcccctatgtatccgactattcgcgctacctgccatgcgatgtttccgccacgaaaacgtggtgctcagtgtttttcggcaccgtatttggtacccaaacgtcgatgacgctcggggttctgacagcggccattgccggcagcgcgttccctggtcatgaggtgagctatctggtgggattacgtaagagtcaggcgatggccatggttatctatttcgccatctgttttggtaaaattaccttcactaccctcaatgcgtacggcagctttatgtcgctgaccaccattgtttccgccttccgccggcaaaccgtgctgtcgcaaaagtgtcgcattgcattcgtggtgctgatggtgacggcttcctgcattatcgcgttgcttagcgaacccgctttcttaaagcatttcacgcattttcttctgtttctgctggcgttcttcgtgccgtggagcgccatctgtctgacggattattatcttatctcgaagggcgccatcgatattccggcgctaagcgacccgcagcaacgctacgggttctggaacctgtacgcgatcaccctgtatatcgtcggtgtgcttatccagttgccgttcattgagaacccgttgttccatggttcgctcacgtggatcttcgccggtaacgatgtctcatggataataggctggtttggcaccggggttctttactacgcgctgcgccgctttgaccgccggtcgctgccggcgcagagtcttttcccttccacctgaatgacaagggcggcgtgagggccgcccctgccgttgcctgccagctatttcccgtctttgcgccaggcgtcggcggtgagggcttccccgaagtggccggcgatcaggcgccgggtcaggtcgtgcagcggcgaggccagcacatcggcagtgctgccgcgctcgaccacttcgccgttatgcatcaccagcacctgatcgctgatgtgtttcatcattcccaggtgctgggtgacatagatataggagatgccctgtttctcctgcagctccagcatcaggttgataagctgggagcgcatcgacatatccagcgaggccagcgcctcatcgcagatgataaccttcgggcgcaggatcagcgccctggcgaggccgagacgctgcttctgaccgggcgccagcatatgggggtagtagctgacgtggtccggcagcagaccgaccatgcgcagggtgtcgattatctgcttctgccgcgcctcggcgtcgagatcggtattcagtcgcagtggaaaatcgaggatctgcgagatgcgctggcgcgggtttagcgaggtcgacggatcctgaaagatcatgcgaatcttctggctgcggtaggagtaatccccaaaagtcagcggatgatcatcaatcagcagttcgccgctggtgggttccaccatgcccgccagcatcttcgcgagggtcgatttcccggagccgttctcgccgataatcgccagcgtctgccgttcacgcagggtaaaactcagcggcttaaccgcctcaaccgtctgacggtgaaaccagccggtgcggtagcgaaaggtcttactgagttggcgaacttccagcaatgtttcgaccatttcactctttctccatgttcaacgggaaatgacaggcgtacagatggttgcgcgccccggtaagacgcggcgtttcgatacactcgcgctgggcgtacgggcagcgcggccctagccgacagccgataggcaactgctccagcagcgggatcgctccaggcagggtgttgaggcgacttttatgcggcatggcgctaccgaaatccgggatcgcgcggattaacgcctgggtgtaggggtgatgtgggagggtgatcagctcttcgctgggcccactctccaccgtctgcccgcagtacatgacgttgattttatccgcccatttgctgagcatttgcaggtcatggctgatcagcaagatggtggtgttgttgttctggttgagccgcgtcagcaggcgaataatctgcgcctgggtggtcggctccatggcgttggtcggctcgtcggcaatcagcagacgcggctggttggccagggcgatggcgatcatcaccttctggcactcgccctcggtcagctgataggggaagctgcgcatggcatctttgtgatctttaatgccgacgcggtgcaacagctcgatggcccggcgcttgcgccagcccagccgttgccaccagcggcccttgtaggtccagccggggatactctgaatcagctgctggccgatgcgctcagagggatcgaggcacgactggggctcctgaaaaatcatcgacacgttatggccgatcagcttccggcgctcgcggttcgacagtcgcagcaggtcgatgtcatcgaagcgcatgcggtcggccgtgacccgccagttgtctttggtcacgccgcagatagctttggcaataaggcttttcccggagccggattcccccaccaggccgcggatttcgccttcggtcagcgtcaggctgacgcgatcgacggcttttacccagccttcgctggttttaaattcaatggttaagtgacgaatatcgagtaacggcattattctaccccggcaatgatcgcccggcgaataccgtcgcccagcaggttgaccagcagtacgctgagcataatcgccgccccggggagcatcacggtccacggcgccacatagataagctccagcgcatcgcccagcatggctccccattccggcgaaggcagctgggcgccgagatcaagaaagcccagtgcggcaatatccagaatggccatcgacagggcgcgagtgatctcggtcaccaggccggaggcgatattgggcaggatggcgaacagcagaatattcagcgtcgaggcgccgtcgaggcgggcggcgatgatgtactctttctccagctcatcgtggaccatgctgtagacggagcgcaccatgcgcggcagcagcgccagccagacggcgaacatcgcatggctcagatgcggcccggcaaaggcgacgacgataatcgccagcagcagcgaggggatggagagcagggtgtcgaggatatggttcatcaccgccgagcgcaggccgtgggtcgatccggcaatcacgcccagcaccagaccaaacagcgtggcgccgagggtgacgacaaaagcgccgccgacggtgggcgccgcgccgctcagcagtcggctcagcacatcgcggccgaggtcatcggttcccagaaagaaggagacttcgccatagcgcgaccacgacggcggcaacagctggtagccgaggaactgctggtcgatgccgtagggggcgaaccagccgccgaagacgcagagcagcaacaggcccgcgcagccgtacaaaccgatcatcgccgtggtgtcgccatagaacttacgccatacggtgcgcagcgcgccgggcggacgcttttccagataaacgctatcgtagggcatatgaatccgttttaagtttgttagtcatgctttaagtcttttcaaaaatcccgctaataccaataccttgctagcatagagtgctttaattttgtgtgttctgcattgatttgaaggttatcaatttaaccaaaatgtgtacactgatgtgtatatcatcttccggagtgtacacattgcttaccgacacaaaattaagaaaagctcttggcaaaaagagagaccagatcgaggtcatatcggacgcccatggtctgaatgtccggttgtctacttccggcagtataacattcttttaccgctacagatggaacgggaaagccgctcagctaacgattggcgattatcccaccacctccttatctcaagctcgcgaacgtagacagcagttcagggcctggttgacagaaggactcgatccgagacggcaaacagttctggagaaacagaaaaaagtcgaagcgctcaccgttaaagaggctttcgattattgggaaaagtattactgcatccccgaaggtcttgtgaaaatcaaggttaaccgacgggacttcaataaccatatagcgcctgtgctggggaacatgattgttgatcagaccactaaagcgcactggcttaacctttttgatggcatggggcgaagagttgtcactggtcagatgcttgggctgatgcagcgtacgttccgtttttgctccaatcgaggggtaattaatgtgaacccaattgagagccttaggcgctctgacgtaggtctcacagcatccgtcaaagatcgcagattgagtgatgaggaaatcaaaacagtttggaatatccttcctgaattgaagtacagacaacagctgataatgaagtttctcatcatgactggctgccggagtacggagatcaggacggcaagatgggagtggttcgattttcatgagcaaacgtggaccattccggcaagcgattataaaaccgggaaatcggtcagaagggcacttcccgaggcagtagtaagaatgatgttagcagagaaggaaacgtcagtttcaaaacacgttgtgacactgtcacgctacagagggccagaagatgacagaccgccactacaaccaaacgtcgctctgttttctgctcagattatagctaaaacaggcatgaagccctggtctctccatgacctcaggcgaacagtggcgacacgcctttctgaattaggtgcgccgccacatgttgtggaaaaactgcttggccatcatatggcaggtgtcatggcacgttataacctgcatgattatctggatgatcagcgtcactggcttgctgtttggcaggatcaccttgagaagctggttggtcagcctctggtttgatccccacgttatcttcccaggccaacaagtctgaaagtctccaccttttagggctgccatttattttaggctgcgggaatggctgagcaaagtaagagggcatccgggatggggtgctccagaaataaagtgtgctgcgcgatattttgtatctggacagaacgtcatcggttatcaaaatttcatctgatttatgagatgtattagtcataaaaaccccttagttacattgtccaggcagatggtgtagccggcgcgcgcagctcatggctgtggccacatagctactttttctgttaacaacttctacagtgatctttgagccttgaaccaccaccgtataagttctctttgttttctgtcgcccgtaggctccataaagctcaacgtgttttgccagtgccgcatcgcacgcttggcggcccagaggggagtgtctgcttcggttaatcaatcgcatatacattcctttatcgggagagtttcccctcccaatctggttaacccacgtattccggtttcatgtcgtccagggtgatgcggaactggtcatacagttcatcaccgaggtggcggcgcgatgaggtcaaggtgctttctgccttcgcgaataatgcttctgcttccggatcccccgggttagggagtgaatttatggcggcctcaactttgttcttcgcatcaacaaggtagtagcgtttcaccgccttactcttcagttcggtatacaaagcagtacccagcagagctttctgtgattcgatgtctgcacgaatggctttggcctggtccactgagtcagctgtatcaatccggtctcggagttcgtcagcaacagagtcaacgttagatgcaggctcttgcgtgctggtggaatcgccaacggagtgtgttatctcattcagcgtgaccttttctgtctgcgccgggttgataaccctttcttcgcgttcgtcaatttcatcggcggtatagaccccgaggatcacatccgggcagtacagtcgcgcccaacgtttaacggcgagataggccagttgctgacgggggtcgctcgcccacagtgtagagttgcggacttgtgcctgcgaaagcatcagcacaagctcgcgaggttctgattctcctttgagggttgcccaggcgcggacgcccacgccagcttcatcttgcaaatcccagcccggcgcgatgtagtcgttacctttgccgctggtttttttaatgaagcggccaacgatattttcccatgcaccaaaccattcaaagtgaatacggtcttttgtcggagccatggtgttaattaccgcattcaccagttgtgcctcatagccaagcacacctgagttacccacgatgaaggttttctgtgccactgcaaacggatccataccccaacgcgctgcctgcatcactacagccatgcacgcatctggtttcccgcgataatgctcaggcacgaagtttccactattggccattacttccgagagcgtgcgcaggcggttgaacaattcaccgttcgtcaggatagaaacgttgtcgatcttctgggtctggttttcagtagttgcgactaaattggacattgttattcccccttatgcctgcacgcgcagcgcttcgagacggcgcatatcaaaatcgttaagttcttcggtgtagtcttcggtaatcggcgccggccattcgccagtgtcgaaaccgttcgcaatggcgcgcatagctttgcggtattccagcatgccgagttccagcagttcttcggatgcctcgatgatggcgatccagtggtagttctcgtctttgttaacgaatatccagaagaactggtcaagggctgcggtttcgcagtacatagccgcgctcaggtggtaatcgcgctcgatgatttcccggtgcagcttcgcgcgcaggccttcctgcttgatgttccacatactgatggttttcaggtccgcaccgatgcgcaggccgcccatgtctatctcaaggtcagggcgcacgcgaacttccagcccggtttcctcatcaatgccgaaatagctcacctcgacggcacggctcgggtgcgtcaacaacttgccagcggtcgggtgattcaacagtgctttctgaatggccagtgccgtagccagctgctggcgggtaaccagcacttttccttccgggttctcgcgccatgcatccagcaactcgtcggcaaacacggcatccggttttaccgatttcacggcctgaatcagatcggcctttgcgccagagactttcagcggctgcgccttctgtgcttcctgagcaaccatgtcaggattaataagcgccagctgttccagtaaggaatcgcggctgccgctggttttcacctgggcgggcagggtcgcgttgtattccttgatgcatgccttcatagcggtggcagtttgcttctgaccgtcttcaatgcgctggaactcagcaggtaaagacatatacccctggccggtttcttcaactgaagtacccaagggaacctgggcgggcagggtcgcgttgtattcctccaggaatctcttgatgtcatctgcgctgagcaaaaccggaagcccgttgttgtactcgtcgataaacgcgcggatcgtcgcagtcgtggtgaatgcgccttccgggatttcgggctcgatgctgaattctttttccagctgatcaggctgcagcgccagtgcatgcaccagatttcccatatccagaacaggggagcgtaccttctggatggtcttggatacgtggcgcgcctcgaaatacatcagcgatacccgcgcatctttaaccatcgtggagctgatgccgttagcggcgtggtagacctcatttggcacgccttcatatcgacccggctcgaaatactccggccatgctggcgctatttgttcagcctcttcctcatcatcaatgtgagcattctcagaaacctggcttttcagcacttcggctgtaaggtccgggcaacgttcagccagtatttcgctcatgttcacggcagttgtttgcgcaggaggttcatcagcgctttcgcctgttgataccgaactatcaatttcgtttttgactgactgatccgcttccatctgcacattgctggtggttccttcttcggtggcatttgtagccggtgaagtcataaggccttcaattgaaaacattccgccgccgagatttgcaatttccggggctctgggtttggtcaggtcttcggttatccacttcggatccgtggggtcactgataccttcgacatattcgccacgttcggcggccagaacctgattagcgtcaggacgtttcttttgcgcttctttcaccagttcggtgccaattacctgaaagtcagttgggagagtttccaggtccggcacaccttcatctccatcgatagcctttttcacagcgtccagagtgacggcggcagatgaaacatgaccagctttttcaagcgtctcagcagaaggggcgtcatgcttatgctcggtcaggttcgcattgatataggtctgcagacttaccgggaaatgatgaatatcgctggtggcgccacgaataagggcaaaaatcgcggcgcgggaataatccaggatgcctgcaaccttgcgcagcgcagccgaccattccttgaacggactttctttcttctgaacgatctctttggcccggcggtgaatagatgccgggaaattgtagatatcgaaatccattggcattgtggccagggctatttctacatcgagcgtatcaagggtatgggtgtagtcagggttgcgatcggttttattaccgccgccagcattagttcctgcatcagttttcaaaaccgaagaaatgcagttaccggcagcccattccctggtgagaatgccgcggtcgatcgcgttcgtggcgaaccacagctttgcaaactgaatacgtttgccgagctcatgccgtttcccttccgggaagacttttttattggcgctggtgaatttccagagcgccggcatatcgtattttttgatttcagggacattctcggcggccaggatcagatcctggacggctgcgttatcagtgtccatttcaagagctgacagctcctgccggtgaggcatgctgatatgataaacgtgacgttcttcggccatgtactgcgccagcagctgagcgcgaaaagggagttctgccacattaaatagcgcgctcgaatcgtcctggtattcatcgctaccgaaagtttccacggtctcatcttgtgccgcgtcgccagtagtattggcatcaaccaactctccagtaacggcctcagaggatactccggcattatcgccgtgatgaacatcagcaggcgccagtcctggcttaagagtccaggtgcggccatcgtcgccgagctggtagcgttcgcaccatgagtaatcgagaacaccctccgctggcaggtcgttgaataccgggaaatcggtgcgaattggtttttggtaatccttaccgcggcctgtttcgatcccagcgtcttccagatcgacgtccagctgcagaagggcgcgagcttctgttttattagtgcgccagattacggcatcagctttacccgatttttgagtcgcttttatcagataaaaatattccatgtgatagcctctattttggatgtagaatccccgggccattggtagcgcccattcagggtggtcattggttttggtaatttccggtgtaactttggtcggtggcaccggacgtacagcccgcttcggcgggtttacgttagccctcgtgagccatctggtcgtgagaggcgcaacgttcagagcaatactctttttctttccgtgcgagctggttcccctggaggtacaacagggtgcttaccactggttttccctcgattgctttacggcagtaaccgcattttttctgcattcctccccctacatttgcaccgtgaacccggccggatgcttgtccagtacacctttcagcggataacattcagctttcacgtgttgctcttctgcagctgccttgcagtcattctcagtgtcgtaaacgccgagcaggacatcctgattaccgcccgtcagcatgctgacggtgagaaccagggcaaacatcgtgctcatgaagggtctcctttttgcgcgagcatgtagcacactcggcggatgaaagctgacagcggatttaaacgaacagcctgctgacgagcgggtttgcgtgcgaaatcattcatagaaacaatcccctcagtgcgctgaaaagcgcgatccagatgaagagcccaattactgctgaaatgaccatggctctgataccgtgcttgctcatttcaactcctcatgtatgcctgtcttttaaccacttcaggctcggtggtatgctggtagttctcacacagccagcaaggaaataaaaatgtcaaaactgacaacgatgaaagttgcttgccctgattgcggaagcgagatgctcaagcgtcccgatgatttcgactttgatacaaattttgttggcgtcagttgtgccaactgtggtcgagaaatcactaaggacgatgtcgttaagcaagggacggatgttgtcaaaaagcaggttgacgacattctcagggatgccttcaagggaacgggctggaagctcaagtaaccccagtagttcctcgacctgattgattacttccgtggcgtctatttcgagttcaataggcgccacctttaccttactcatctcatcctcattgccttgtcgccggccagcggaacgttactacctactgcgcattgatatttccacctcatcccggcattcgtatgctccgggcagctacttcgtgggcgtcctgccttggtggggtgttgctggagttaattaaacacaatgtttaatgttgtgtcaacattgtgagtaattaaacgtaaacaaaaagtttataacgagaggtgggttagtgcagggagtatgtttatgggtctattctttggttttaaaaacatctatgagggctaatggtatgcggtatgacgatgagtttttcgcgaagatgcacccgcaaatagcgcaggttatcggggtagcggttatgcagctactggttgagaagcaagagccgtcaagagaggctctgatagagatgatttaggtgttgtggcaggaagaccatgtcgatctggctgtggaattggcccttgacgttctgtcgctaccgaaagagtaggggcaataaaactcgacgcgtggccgggctactggcgctgacaatacggcaatattttttcaatcgctgattgaataaatgaagggctatgaaagtcaggatctttcaacgggtcactgacatcaatactgttttgcagggagcgctgatattcactccagagttccgaaaggtgtttcttgttcttggggctgcagatatcaatgaacgtatcaatctctcgctgtgatattgatacatttccgccaccgggaaacactccattctcaataagtcgcaattgatctcttaatttttgtcttattatatcgcttattgcattgaactctttgcgtttttccccttttactgcatatctgtagctaaagtaaccgcttgcaggaactgctgtgatagatacaatcattgcaatagttgcaacgatgtcgctatagctcatggaggttttcctatgtctggctctgatatcttggccacagttgccttgattatttcagttacaaacctctccgtaattctctacgggatatggcgcttacgtgattaaaccgttgtgatgattattcttcatcgcccttaatccttcgccccatgtacttggcatacagctcatcgagttctttgagacgcagagatacgatccgcagcatgttctgttgctcttcttcgttggggagttggttatagagttccagcaaccgtttctcgtccgggcgtaaaccatcatttgcatcgacgtcctgacctaaaacccactcaaggcttacgccaagagcatcagcgagctttatggcagagctctttccaatcgctccccgcacaaaccagttgttaaccgattgcgaacttacaccacaaattctcgctatatccgctttggatatgcgcttcatctcaattatttcattgagcctttggacctgtgggttgtcggactggtgcgtattttttctcatatatcacgattttaaactaaatgtttaccgtctcaacattcataaagttgacattaaaataaacataatgtttaatccactctgtaactttaatggagtggtttatgaacgcattagaaaaagccatacacatcgctggtgacgcaacgaagctagcagaaaaactggacgtctcatctatgacgattagccattggaagcatcgccatgggggagccgttcctcagtctcgggttttccaaatcttccgggtaaccggcgttactccgcatgaacttcgcccagatctttacccaaatccaaacgacggtttgtcttcacaaaatctggtgggatgaccatgcaaacactttcctttcaacaaaataccggattcaaccccggcgctctgataaagcgaaatcaggcgaaagtggcagatcacgacggcattcgttctgccgttcgcgcctgggctgcagctgaaggtcaggatgttgtatcggcgtacatcatcgatgagtggcgccagcagggcggggaagaaattgaatttcctgcggacatcagccgcgcccgacagaagcttttccgttatctggataacgaggtcgattctgaaaagtatcgcgcgaatgtgcgtcttctgacgccagccatcatggccgtcctcccgttggaatttcgccaccgcctgttgcctgaagacaatttcatgtcccgactggcacggctggagaaagagaccagcgaagcgaaggttgccgttgccatgggagctccacgtcatcaaaagctgaaagaactgagcgagggaattgtcgagatgttccgggttgacccagaactaacggcgccactgatggccatcgtcacttcaatgctgggggttttgtaatgtcgggtatcaaaaaggcgaaagccgcggtgctgtaacaccaacggctttcaggtgcaaaaacgaagaggtaattgcgaggtaagtatgtcagaaacaaagactgaggtaaacgcccaagcgacccataaatgctccttttgcggagcgagcaatattgaggtttcgggcgttctaatcgccggccccggcgtatccatctgtcaaaaatgtgtctttcagtgggttgatattgtctttcaacacgcagaaaagaccgataaaccaacgtcataagttcaggggtatctatgcgtgactatgcaacagtcgcaccgcaattctggctggggaaaacaggtcgggaactgcggaaaaaaggcgctgaagcgcaggtggtttcgttttatctcatgacctcgccacacgcaaacatgctcggtttgtattacctgccaattctctatatcgcccatgaaacagggctgggcttagaaggggcttcgaaggggcttaaaagcaccatcgaagcggggttttgtagctatgacgaggacacagagatggtctgggtgcatgaaatggccgcctaccaggtaggcaaggcattaaagccaggtgataaccgttgtgcgggggtcaggagtgagtatgcatcactttcagaaaacccttttctttcatcattttacgagcgttataaggatgattttcatctgaatgtcaaacgcgaatcgtgcccaacgccagaaggggcttcgaaggggctaggaagccaagatcaggaacaggatcaggaacaagatcaggataaagatatttcggggcatggcgacgccacacccccagatggtggatcctccgatgaagctccatctgaaaagccgaaaagcagttacccggaggaatttgaactggcctggagggaatacccaaaacgtgccggaggcaatagcaaggtcgatgcgttcaaagcctggacagcccgaattaaatcaggcgcaacagcgcaggagcttaccgatggtgttcgacgatatgcggattacgtcactgctgccggaaaactcaacactgagtacgtgaaacaagcgtccacgtttttcggtccctcaaagcactacgaggagttgtggagcttcgaagtaccaaccggtaaacgggatccgaactcaatatcccagccagataaattaattccgagtgggttcagggggtagtgatgaaaaatatgattggtactggtagtgcgctggagcggctgaaaaaactcatccctccgggtgtagagcctaagtttggcagtgtagaggagtggagaacctggcaggccgaggaagggcgcaaacgctgcgaagaactggaaaaacaaaaccagcgtacccgtgctgaaaaaatattcggacgagcgggaattcaagatctgcatcggagctgcacgttcgcaaattaccaggtggcaggagatggtcagcgccgggcgctcacgatggcgaaaagttacgcacagaacttcggttcagggttcgccagtttcgtattcagcggagcgccgggaaccgggaaaaaccatctggcggccgcaatcggaaatcacctgctggctggtggtcgctctgtgctggtggtgactattcctgacctgatgctacgtgttcgcgagtgctacgacgacgggcagtcagaggcttcgcttctggacgacctttgccaggtagatctgctcatcctggacgaagtaggcattcagcgcggcagcagcggcgaaaaggtcattctgaaccaggttatcgatcgccgcctgtcgtcgatgcgtccggtcggcatcctgacgaacctgaactacgaatctctgacgggcaccctcggcgcgcgcattctcgaccgtctccagatggacggcggcatgtgggtgaacttcgactgggatagttatcgcaaaaacgtccgccatctgcgcgtcgttaagtgaggaaaacatggctagagcattttctgctattgagcgccgggagtatgtccgcgcagtgattcgtatcaccagacatcaggggcgactcacgaccgccgaggcaatgaaaaaactggggctgagccgcgctactgtccaacggtatttttccgaagcagaagcgactggtgaggttgtccggcatggtcgtttggggctgttccgcgatcagcgggccgtcatcgactttgacatgaagcgttttggcctggtgccgaaagttgctgttgggatgaattacagcctgcttggcagtcctgtttttcagcgagttttagatgttcaggaggctattcatggctaagaattcaatcgatgtatacggtgccagcggcaaaacaaacgtgctcaatttcgagcctgaaaacctgcacctggtcaccgataagacccacccactttacgatgagcgagtacacctgccgatcgaggaagggatggtactgaacattgcggagctgggtgtactggagccaatcatcgtctggaaagaccctgaaacggggctcacttgcgtagttgttggccgtcagcgcgttaaacatacccttgaggcaaataaactccgtctgaaagaaggcaaagacccactgcttgttcccggagtcgttaagcgcggatcagcaaatcagatggctaaatacatggtcagcgaaaacgaaattcgccgacctgatacaccgcttggccgggctaaaaaaatgtcagacgcgctcgaccgcggactcgatgaggacgacattgcggtgttgtttggctgcagcgttcaaaccgttcgtgcaacgctctcccttctcgatgccacccaggccgtccgggaagcagtggagtcgggcacagttaccgttacccaagcccgccagcttggcacacttcccccggaagagcagcgggaaaaagtgaaagagattgaatctgcgaccgctgggactaccggtcatgaaaaagcccggcgtcagcgtcagatcctcggtgaggcaaagccgcgcctgaaaacccgcaaagaaattactaaagccctggaatctgccgagggtgagtatgcgagcgcactccgttgggtgcttggggaggccgtatgacaatcgtaaaaacccataccggcaccgtgatcaccaaagacggtccgaaggtaaaaaaactgcaccagacagagcggatgtgggtcgtcggcaaaagcgagttttaccacaaagaaacagggcgccgtcactttgcagaaaatacgcgccgccggctgctgctcgacaccatcaagcctatcgaggtgaagcatgtttaaaaagaacaaaaaggctatttcacagattgcggaatatatcccgcgcgcctgccggggtatgcagctgcatgaagcgaaagcgcgtctggagaaaaaaatcgcgctctataccgatgacggctgtgatgttgccgttcttaatgcggcctttgcgccagctcttaacagtcatacgcgggagtcttttttttcgagcatcgcagcgcagctgcatgagggggccaaatgaccgagcaaaccatcctcgacatgtgctgtggctcccgcatgttctggttcaacaaacgagatactcgcgcggtattcgctgacattcgagccgaagagcacaagctgtgcgacggccgccgtctggttatcagtcctgatctcgttgctgacttccgtgcgctgccgttcgctgatgcctcatttccggttgttgtgtttgacccgccacatcttgagcgcgtcggccagaccgcgtggatgggcaaaaagtacgggcgcctgaacaaaaaaacatggcgtgccgacattcgcgcaggattcaaagaggcgtttcgcgtactgcggccacatggtgtgctcatattcaaatggaatgaaacccaaatccccgttagccaaattatagctttaacagacgagaaaccggcgatcggccagcgcaccggaaagaacgataaaacccactggatcatcttcgtgaagggagctgcggtatgaaaattaaatgcatcaaagacacagagggatactggactgaaggtgaaatgtatccggcccgtgtagttgctggcggttttgttcaagttggcgacgattacgatcgcattggcgagggctggagcgctatgcctatcgaataccgggatgacggctcgatcgtttatgaattggggggtattgaagatgacgttcagtttgaggaacgtgcagcatgcgcaaatcattaaccgcacgctgtatgtggatgggaagttgagtttaaaccgtattgcgactcgaaggttagaccgaagtagtgcaaaaccccacgcaccgaccagcagcgcgcggcatgaaggactttgccgcgctaggcttctacgtggtggcgctgcatagcaaagcggtgggggaaattattcccccacaatgaaattaaggctttttgggaggtggtgccggttgagaagtttgcttagcaggctgaaaaccattattagccaaatcatttttaggttgataacccttttctaggggcttgtaaccatcttccttataagtttttttagtttctgacatatacaaaatcctctatttctatgggtaggtagtttgctgctgttcaaagcggaaaaactctaagtgctcgatatccttacttaaaatcagtattcctaaagtggaagtgcgctgacgttcaaaaccaccgtcgctgtttaattcccaatgttcctcaagatagatctgttcaggttctggagcgctggacgcaaacgagttagctccatacttacccgctattttcttcccatcttttagcgtgataatcatccagcatggaactttcagaccaaaaaaataatcccatgccctacctgtggggtgaggcatgtatttacatagccaatcccattcgcgcatcctcgaaaacaaaaaagccaacagtgtcgggctagcaaataatataaacaagtaaaataaaaagtaagcgaaaggannnnnnnnnnnnnnnnnnnnnnnnnnnnnnnnnnnnnnnnnnnnnnnnnnnnnnnnnnnnnnnnnnnnnnnnnnnnnnnnnnnnnnnnnnnnngctttagatgtatcaaaaaaagcattgggtctaagtacgctatacatcttcatacttatgaagccaggtataacgaatagtaaaaatattacaattttgctcttatcccagatatccattttgttttccaaggcgtagaggtcacataggtcacccctcatatgatatcctttaaacctacaagttaccaatcccttctcatgaaccacgaaatggatatcgcgcgttgcgacatatgggtggacatagcatgggtaaaaccgtggcgacgctgatctcgttggaaggtatctttttgggcagagcagagacacagtcagcgaaagtacttgcttcgctgttacggctaggacattgcaggatgaggccttgtcatagggtgacctgcgcaatatcgaagtgtagctattgaaaacgcgcactgcggcaacgctgtctcgcctccttttgctgaggcgctggtgagggctaatttaccggagatgtgcctgaaaaaagacattgcagcatgataaaacccgcttcggcgggttttttaatatggaaaaacatcaatctaaacataagcatggtgttagcaaaaagtgctgcagaggggttgaacatttcatgcaaccggtatactgtttatttatacagtatccatgtgaggtgctaaccatgaaagttgaagtcacaattgataaacataaaaaactccctgatggcgccatacctgcgcttgagcaagaattgctgcgccgcttgtcccagtcttatgatgactgcaaattaactattagacgcacaagcaacgatggccttagcgttttgggcggcgctgatggcgataaaaaacgcgttgagcaaattctgcaagagacgtgggaaagcgcggacgactggttttactgattcaccttttggtggctggcatttcccaaagcatcgcaataagcgtgtccctttgatgctgtcaccggacttttttttgcgtctgtatgtcgctcagggggtagtgtgagtgatggtattgaggttcctactaatcattcctggtacgatgttgtcaggagatcagatggcgccattatttgtagcttcccggccgaaggaaggcatctgatttacagggttaatggcataatttcaatgcgacctttattgcctgaagaagaaatttttactctaaacggatttatgaaatttgcggaacgacttggctaccgagttctcccaccttctgataatatgaaatcaacggcctgaacaaccgttacctactgcgccacggagagaagccatggcgcaattgcacttaataaaacaatctcaaggtatcctgatccccgcgacgccggagaccagtgattttctgcaatcaaaatgcaagctcggatccgttctggaagccgattataagcttgtccgcaatccggcgtttcaccgccgttactttgctttactcaatctcggctttgaatattgggaacctaccggcggggcgatttcgtctaacgagcgcaggcttatcacaggttacgccaaataccttgctgcatatggcgggagtgaatcggcgttgcttgatgccgccgggcaatatctcgaccggatagctgagaagcgatccggctatatcagtatttgcaaatccttcgatgcttaccgggcgtgggtcatcgttgaagccggccactatgacgccatacagctgccggacggcacgctgaaaaaacaccctcgcagcatttctttcgcaagcatggacgaatgcgagttccaggaactgtacaaagcatcgctggatgttctctggcggtggatcctctctcgttcattcaacagcctgcaggaagctgagaacgccgccaaccagcttttaagcttcgcggggtgatgccgatgaaatactcatggtttcagcatcccgaatgcactgcggagcaggcagaacagttggtgtccagatatcaggcgcgtggcatcgtcaccgagaaaagccttaacccggattatctgagctggacggtcagcgccaggctgccggtttgtgctcgaccggagtatacgccgcgatcacttcgtcaacggatttgggggtaagcatggctaatcttcgcaaagcggcgcgcggccgcgaatgtcaggttcgtatcccgggcgtctgcaacggtaaccctgaaaccacggtattggcccatatccgcattgctggattgtgcgggaccgggattaagccgcctgatctgatcgccgctatcgcctgttcatcctgtcacgatgaaatagaccgccgcacgcgcctggtagatgcggagtatgcgaaggagtgcgcgctggagggaatggccagaacgcaggttatctggatgaaagaggggctgataaaagcatgaaccaatatcgaatttcattaccctggccaccaagcaacaaccgctactaccggcataaccgggggcgcacacacatcagcgcggaagggcaggcataccgcgacagtgtcgccagaatcatcaaagacttgatgcttgatatcggcctttccacgccactgagaatccgtattgagtgccacatgccggatcgccggcgccgtgacctggacaacctgcaaaaagctgcattcgacgccctgacgaaatcgggtttctggctcgatgaccagcaggttgactactacagcgtgaagagaatgcctgtcgtcaaaggtgggcggcttgagctaaccattaccgaaatggaggccgcatgagccgtgacgttatcgaacgcatccacgaccgctggcaaaagctccgcctcctgcgtagccgcggcaccgtgctggttgactacaaaatattacgcaatttcgtccgtatctataagcgcctgggagaagaagcatgacagctcaatacttggaatttgttcgccagcagctgatagtggccaccgccgatctgagcggcgcgacgaaagggcaactggtggctttcgcagaaaatgcgcaattcaccgctacggcgcgcagccggggaaggaagaaagtagccgacccggtaaccggccgcatggtaaacccatccagcccgccaattcccgggcagcagtcccgcgctaagggttcatcaatcgctctcgttcttcccgttgagtattcgacggcaagctggcgccgggctctgctgtcgctggaagagcatcagaaagcctggttgctctggaactacagcgacaatatccgctgggagcaccaggagacaatcacccggtgggcatgggagcaattcagcgagaagctggctggcgtgcgcattgcaaagaaaacggttgatcgcctccgtcaacttatctggctggcagcgcaggacgtcaaagccgagctggcgggtaagtatgtataccagcaccaggatcttgcagccctgtgtggcgttaaacctgataactggtgccataactacgctgattactggcggactatgtgcgccatttttaagcggcttgatagcgactctcttctctgtgtcgtgagaacacgatcacaacaaaaagcgactttttcgcagcagggtcttgcaaaagtcaattaaatgcgtcatatttgagtctactttgatatgctgccttaactttaagtggcggcatgaagatgatagtcacataccagtttgtaaaattagcctcggcatcccgccggggcttttttatgcctgcgatccggtcagggctcttgggtagagacgtgccgcacgacacgttaaagccctccgcgcagagccctgaaccagatttctggtttagctcagcaataagaaaactgcatgccatcatttgcttacatcttattgaccagaaaaataacatcttgttaatctattcatgtggtgaatccccctgtgcggtggggcgaccagtcacttacagtgatctgtaaatgcagcgcgagtcatgtcggctgggacatgctcaccgggaggcacccggcaccatgcaatactactaagacattaggttgtgggttgccgtttcggcttctccagctatgtttaaaaggcagtaacggaaaaagcgagcgctctcctggtaaatcggtagctcggactattaggtgcgttttcgtttgttactacctagaatgcctactttctgcccgttcctctgagcgggctttttttcgccatgaataaggctcctcggcaagctgaggaacaaatcatttgaggctgcgcttatgcgcggccttttcattttcccctcaattctgagaggactcacagcaataagagggggcttaatgtccgatcctttaactggtaccggcctgatttttggtggcggtttaattggttccgtcatatatggcgttatcacccataccgattttggtgtggtatttggggcttttggcggcgcagtgttttacgtggctacgaccgcaaacctgacacgtggaaggcaaatagcttacttcatgacgtcgtttattgtcggtgttctggctgcaggattattaggctcaaaatttactgcatggacaggctatacggatcgtccgcttgatgcgctcggtgcggtggtggcatctgctgtaactatcaaggtcctgactttcattaacagccaggacttgagcagcctgttcggattactttcccgattaaggggaggaggttcgagtggtaataaatgacccggcagcgctggtcaatgcggtgatatgtgccgttattgtctgcgctttgatgttttatcaacgtcgcggtgccaggcatcgccctggtatctccattcttgcttacttgctggtattgatttacgcgagcattcctttccaatttatcttcggtctttacgtacagtcccactggctggtggtaatggcaaacgtaatgatatgcgccgccgtgctgtgggcacggggtaacgtggcgcgtctggtcgatacactgaggcactaatgaatcaaacacaattccagaaggcggctggtatcagcgccgggttagctgcgcgctggtttccgcatattacagccgcgatgaaagagtttggcataacagcagctatcgatcaggcgatgttcattgcccaggtagggcatgaaagcacgggatttacccagcttgttgagagcttcaattatagcgtggccgggttgaatagttttgtccgcgccgggcggctgacgcagggtcaggctaattcgctcggccgccgtcagggtgagccctctttgccactggagaggcaaagagcgatcgccaacctggtgtacagcaaacgcatgggtaataacggggcaacagacggctggttttaccgagggcgtgggctcatccagatcaccggcctgaacaattaccgcgactgcgggaatgctctgaagattgatctggttaaacagcctgaattgctggcccaggatgagtatgcggcgcgcagtgctgcttggttttatgcctcacgcggctgtttgcgttatcccggtgaccttgcacgcgtcacgcagattatcaacggcggacagaacggcatagatgaccggcgcgcccgcttcctgaaagcaaaagcggtactggtggtgtgatcatgggaatcgaagcaatcgcggggctggtggttgtcatcctgggtgctatcgctggcgcgttcggcatcggccacgctcgcgggaccagtaaggcggaagccaaagccgatcagcagcgtaccgaagagaacgccgccgccaccgtcgccgcggcagaacgtaaggcggaagttgtgaaaggggccagtgatgtacaggaagacgttaagcgtatgggcgatgacgatgttgatcgcgagctgcgcgaaagatttacccgccccggtagtcgttgatacggcctgcaactgggtgagggtcatctacctgaccgaccacgatattgacgtgatggatatgcagaccaagcgcgacattctggcgcacaacaaatcggtacaggccaactgtccgaaattatgactaaccaaggcctcgcaatagcggggctttttattaccagaagcaggagaagaagcatgttaacagtaaaagtgatgtcaccagatggtggcgaagaaatccattgtggcctgagtgttggtttcaaccccaaccagcagagtattgccgtatcgggaatggaccagaacgtattcctgaagcagggagaggttgcctatgtgatgaacgcaaacggcaagaccatttcccgttacgaacacagggtccagcagtaggcattacagaagctcctgagctaggggcttcgataatgctaaaccgaaagatcgggttaaagcctgataaaaaaccccgtggaggaaatcccaaaactacggggtgctgaacagccagccaatggcggattgtagccacatagttggtttattatctactggttgagaataaaactgagagcctagaaggcttgagagtggctcatccctgagctcacgggtagaacggcagactttgtcatggcagagcaaagtcataacttagtttaggtaacatttcggatataacaagcgtagcgggcgtgtatcaattagcggagttcagcaactgaggaatcgagcattcactgagtgccatagataatgctatagttcaccaggaaaagcagattgcatgctgtcatgagatgcagttcatattttgaacgtcagggttaagtcagtagtgaatataactattaatagtggattatttggttatttgtttttgttattaactatgtggccagtttttataacactgtgtctggcaatgtccatagcattttacggagtgttaatgaagaaggctgcgcttgcgtggctgattgccgctttattttttggcattcttggggggctgcgtgggtattgactctctgatattgaggttatttcgacgtctgtaaggatccatagctgccgtcatccatcgaattcatgtatgctgataaggatttttaaaggaaaaggaatggatgatgaatacccataagcttctggatacatacatgttagttggtaccggtctttctcgcgtcaaatatgagattttttcaggagatgaaggatcatatgcgtttattacgatttatgcatatgagcctcatttccatattaagggccatgattccttaaagttagacgaagctgttgatgtcagatctcagatcgaagggcattttgcagatagctaccagtagccaaaccatttatctgaatctacagccccgtttgtgcggggctttttattgcgcctcgaatgctaagtagtaaccaatgccaccgttaattccccgcatgtcgtaagcgcggatgtgcaagcataattacggaccgctcaggctgctgcgacaagcaccgcaatgacggttgacagcaattcaagggcataagagtgactccctcggatagtgggaaagcattacagaagctattctgccgagtggtttctataatatttcccacatcgcacagaggtaagacatgtcagagatcaccacatccgagcaaatccgcctggatatcatcaagaaagttaactacgacaccgcagcggccaagctggccattgactgggttggtgatagcaatctgaaagctgagctattcgctgactctttcgatcgcgtcttcactgaaagtgagattgtctcgaagacccgtaaagcgattcaggaagcgaccgaagcgctggcgctttttgataccgcagctgagtaatcatcacaaatgccacctacgggtggcttttttaatggttatcgaatagggggagtctatgccggtatgcacgatttcaatagaagtaaaaagccgctggtggctgccgctctacctcaaaacgctgatgctattctgccagatgattcagcgagagcctgattacgaaaagatttccgcattcatcgcggagtatggcatcggccagaaagtgaaggcgggaccagtgcgaaagaatacggagtaatccatggcaaaaccggactggggcgagcttcagcaacggttcctgtccgatcatgccgcaaccggcgtatcaccgaaggattggtgtgaagcgcagggactgaattacgctactgcccgccgatacatcaagaaacccactgcgcaaactgcgcaaaaacctgcgcagaagaaactgcgcactgcgcaaaaggaaaagtgcgcagaagagctggtggatgatgatggcctcaccgatcagcaacgtttatttgtcgcagaatacctgaaggaccacaacgccacgcaggccgctatccgtgccgggtacagcaagaagactgctgaacaaattggctatcagctgcttcagaaaacttcagttgcgcaggccattgcgcagcagcagaaagcatccattatgcgcacgcttggcagcgctgatgaagtgcttgagcagatgtggcggctggcaacattcgacgccaaccaactttctcagtatcgccgcgggagctgccgctactgctggggcttcggtcaccagtatcaatggcgcgatgcggtggagtacgaagagaagcggcttgaagcgcttgagcgtaaacgtcgagagcctttggatgatggcggctacggttacaaccacaccagcgcacctaacccggaatgtcctcgctgcaatggtgatggcgtcggccagccattcttcgccgatacgcgcaagctggcgcctgatgctgcgcttgcctattccggcgttaagctcgggaagaatggcgtggagataaccgctatcagccgcgagcgaatgtacgaggcggtgatgaaacgtctcggcctggctgacagtgagttcacccagcgtctacagcagattgaaatcgagcgccggcagctggagatcgacaagctccgtaaagagctggccgctgacccggaagatgacgaaccaacgccagttgcgatcaatatcaacgtagtcgatgcgcgagtgagggaagaggatggcgatagctccgacgcttaacgttccccaggctcgttttctggctatgcagcagaagttcaaagcctatgtagctggttttggatccggaaagacatgggttggctgcggtggaatatgcaaagggttttgggagttccccaaaataaaccagggctactttgccccgacctatcctcagatccgcgatatcttctaccccacggtggaagaagttgctcacgactggggactgaaagtcaaaatcgttgaaagcaacaaagaggtccatttctacagtgggcgccagtaccgcggcacgacaatttgtcggtcgatggaaaagcccgacacgatagtaggctttaaaatcggcaatgcgctggtggatgaactcgacgttctgaaagcggataaggcgcgtcaggcgtggcgaaaaataatcgcgcgtatgcgttataaggttgatggtctgcgtaatggcattgacgtgactaccacacctgaaggatttaagttcgtctataaccagtttgttaaggctgtgagggaaaagcctgaactaaggtcgatgtatggtctggtacaggcttcgacattcgacaacgaaaagaacctgccggatgactatattccttcgcttctggcgagttacccgccggaattgatcaaggcatatctgaacggccagtttactaacctgaccagcggcaccatttatcatcagttcgacagagtgctgaataattccagtgaggaagagcagccaggtgaagcgctgtatatcgggatggatttcaacgtcgggaagatggccgggatcgtccatgtattgcggctcggcttaccacacgcggtaacagagattatcaacgcttacgatacgcccgacatgatacgcatcatcaaggaacgtttctggctgtatgccgacggtgactaccgcaaggtccgcgagatttatatttacccggatgcctctggtgattccaggaagtcaaacaacgccagcaaaacagatattgagcagctccggcaggccggatttaacgtcatcgttgatgatgctaacccgccggtaaaggaccgcattaactccatgaacgccatgttctgcaatggtaatggcgatcgccggtacaaggtgaatgtggcccgttgcccggtctatgccgactgcctggaacaacaggtgtgggataaaaatggcgagccggataaaaagagcgataacgatcaccccaacgatgctgccggttacttcattgtgaagcaattcccaatcgttcgacctgcattctctatttcactggacacgacattctgatggccaataacgatattacttacgttcgccctgaggtcagggcggcaatgcccgtgtggaaaaaaattcgtgacgtgtgcaaaggggctgatgctgtaaaggccgccgggaatgaatacctcccttttctggatccgtccgataagtctgcacgcaataaaaagcgcaatgctgattacattcagcgcgccgttttctacgcgataacgggcaatacaaaagtgggtctactggggctggcattcagaaaagacccgaccatgaccgcgccggataaactgaattatcttcgtgacaacgccgatggtgctggtgccagcatttatcagcagtcccagcaggttacagaaaatattctggaggccgcgcgcgaggggctttatacggattatgcagctgagaccgacgaggcgatcatccttcgttatcaggcggaaagcatcattaactggcgcaccaaacgcatcaatgggcgtgatcaactggtgctggtggttttacgcgaatgcatggaaaaggaagatggttttgcgtacgaggatgaaatccagtatcgcgaactggctctggagaacggaaagtttgtctgccgggtatggcgaaagtcagctgacgcaggctctttttccgtcacttccgagtatcatcctaagccaaaaggtgaggatttctgggatgagatcccctttaccttcgttggtgcgcagaataatgatcccaccatcgacgagtcgcctttagccgccctcgttgaaattaaccttggccattatcgtaattcggcagattacgaagacagcgtatttttctgcggtcaggttcagccggtgatttccggtcttgataccgcctggcgtgactggctgcaggataagggaattcgtgtcggttctcgttctccattcctgctgccgaaggaggggagttttacctatgctcaggcgcaaccaaacaccctggctaaagaggcgatggacagtaagcgtgattattctgttcagcttggcgcccggcttatcgagcagaacggcgcggttaaaaccgccacgcaatccagcggcgagcaaaccgcatccacatcggtgctcggcatttgcgtttccaatgtctcggaggcctatacgctggcgctcggctggtgcgccagatatctcggcataaaaggcgaggaatatcgttacagcatcaatcaggagtttatcgccaaagtcgcagaatccggcatggtaacggcaatcgtcaatgcctggcagtacggtgcgattcgcgacactgatatggtcagagctctgcagaggcttgacctgatagatcctgctgacgaccctgaaactgtcattgacgctattcgtaacggcgcgcctaacctgattggtggcaataatggcaacggcgaatgacaaactgcaggatgaatccatagcccacgctatatgggttagtcgctacagcaccggcgttgccaacaggatgataaaagttctgaatgacagcgacgccgaacttaccgccaggctgctggtggctatcgatacgctggatcccgagagctttaccgtttcgcgtctggaagcgttactggtcagtgtcagggcgataaacaaggatgcgattcagtcgatgtatgcagctcttactgccgagttgcaggaactggcgaagcacgaagccacttttcagatgagcctcttccagtttgccattcccgacgatgttcttgctcttcatccgctggtgggcatctccccggatgcggtttatgccgcggcgatggggcgtccattccagggacgtttgctgagtgaatgggccagcaacctcgaagctgatcggatggcgcggatatccaatacggtgcggcagggattcctgctgggcgatacgcaggagcaaatcgcaaaaaaggtccgtggccatgctaatcgtggttaccaggatggtgcgctgcagatgagccgggccaatgcagccagcattgcaaaaacggcagtagggcatcttgcatcaacagcaagacaaagctttgcgtcggcgaacgacgacattctgaagggtaagcagtggttatccactttggataaccggacatcaaaggattgtcggatccgcgaccgactcaagtacacgctggataacaaaccgataggacacaaggtgccttatttgcaggggccggggaaaatccacttttgctgtcggagcaccgaaacttacatcctgaaatcgtccgaggaattgggtattaaattcggcgaaatcaaggatagctcacgcgccagcatggatggacaggttccggctgacacgaattaccaggactggttctcccggcagtcgttcacgcgacaagctgagattgtcggagaaacgcgcgccaggctgattcgtgatggcggcatgtctcccgatgagttctacaacgacaggggcgagtggctgacgcttgaccaattgcgcaaccttgacgcgcaggcgtttaaggatgccagagtgtgatagagtaaattcgtggtgaatgcaggatgctgacctgcgcgccaaagcgtcccgtgagaaacgggcaagccggaaaccagactcacttcggtgagtccccgccgttctgaagtatcagaatgccgtggcagcaccggccaccacacctaattgtattgtcagtggctagggtcgctcccgaaaagcggaatcgtcaccacctacaaccaataacccgacaagcaacgagacgaggttgttatggattcacaaaaacaaagagaccttattgcaagcctgtatgaagagctggtaatcgcaagagggctcattaaagagatttgcacagtgcgaagcattgcagagccaaagtcttctttgcagagaatggataaagccattaaagatgcaaaagaatatatgctagaaaatagctaaatgaagaggtcgccttagcgcggcttttttattatctgaaatttacaacaggctgcctaagggcggccttttttattgggccaggcccacagttactatcccaaggggacaacatgcttattcgtaacatgctcattaaatattattcggcagctggtggtgaaggtggtgatggcggtggctccggtagtggtgcgcccgagattacgccggaaatccaaaagctgatcgatgagcaggtcagtgctcaggtttcaggcctgaaaaataaaaatagtgagttactcggtaagctcaaagagtccactgagtcgcttaagcgttttgaaggtatcgatcctgacgcggtgaaaactattctccagcgtttctctgatgatgaagaggcgcaactgatcgccgccgggaaaattgacgaggtactggataaacgcactgagcggctacgtgctgatgttgataagcaaatcaaagccgctaatgaacgcgctgaaaaggcggaagcgttctccaacaaattccgtgatcgtgtcctgggtgatgctatccgcagcgcagcgcttaaggctggcgcgctgccagaagcatccgacgatctgattcttcgtgctaaaggcacattccagctcaacgacgaaggcgaggccgtagcagttgatgcaaatggcgatgttctgttcggtaaagacggcaaaactccgctcaccccggttgagtgggctgaatctctgaaagagacggccccgcacctgttcccgcgcgccgaaggctccggggctggtggtcataaacccgctggcggtggcggtagtctgaaacgttcagaaatgagctcaagcgacaaagcggactacatccgcaaacatggccagcaggcctatctcaaattgcctaagtaaggactaatcaatgcctacgaccgtaaacagtgacctgattatctatgacgacctcgcgcagactgcgtttcttgagcgtcgccaggataatctggaagtcttcaacgccgcttcaaacggcgcaatcattctcgacaacgaactgatcgagggtgattttcgcaagcgcaccttctataaagttggtggttctatcgaatcgcgcaacgttaactccaccgacccggtaacgggtaaaaaaatcggtgccggtgaatctgtcagcgttaaggcgccgtggaaatacggcccgtatgaaaccacggaggaggcgtttaaacgtcggggtcgcgacgttagcgaattctccgaggtgatcggcgtcgacgtcgctgatgcaacgcttgaaggttatatcaagtatgccctacagggtcttgttgcagccattggcgcaaatgctgacatgacggtatccgcggatattgccactgatggtaagaaaacgctgacccgtggcctgcgtaaatacggcgataaatttaaccgtgttgcgctgttcgttatgcattccacgacctatttcgacattgttgatcaggctatcgacaacaaaatttacgaagaagctggcgtggtggtttatggcggacagccaggcacgttgggtaaaccggtgctggtaactgacaccatgccagttgatgcgattctggggctggtggccggcgcggtatccgtaacggaatcacaggctccgggcttccgttcctacgatatcaacgaccaggaaaaccttgccattggctatcgcgcagagggcacggttaacgttgaactgctgggttacagctgggatgagacgaagggcgctaaccctgacctgaccaaaatcggcaccggtgcgaactggaagaaacatttcaccagtaacaaatccactgcaggcgtactgattaagctggaagcccctgcgggggagtaaccctgtcagtggataaaacttccgcaactgctgacagtaccgacgcggtgaccgtttcgctcaagtacaccagaaatggtgcaggagtctccggggcatctgtggcgtggacgtctacaggcggcacactcagtgcttcgacgtcacagacagggtctgctggtggctcgacggtgaaactcacctctgctacggccggctccttcacggtgacggctaccgttgacggtgtggtgaaaacaactgaagcgattgcgttcactgctcctgcgggtggttaaccgacggggcgaaagccccgtttcttttggtgaggatccgatgaccgtttatataacaatccaggacgttgacgagttgctgggggatacctgggctgccgccgacaaaaagggtaaagccgtgctccaggcaaacacctggataacggcgcttaaccttcaggatatcgacccggagcatattcctgaagaagttaagcaagccggagcgtttatcgcttccgtagccgctgcaggcaatctgtatcagcaaaaaacagattccggcgtggtgacgagcaaaagcgttgaggccgacgatgtgaaggtttcccgcacttttgccgagctttcaaccaccagcactgaattactcgatcctgatttgcagctggcgctggatatgctcaaaccgtggatgattaaccctttccagacattctttgtgagggcgtgatatgtccgatttgaaggtggtcccatttcaaaagcccagccatcacaacctcgataacgaccaggttattcgcctgctgaaacaggctctggagagagccgaaaacggcggctgccacagtgtcgcagtgatactgcttgatgatgagggtaacgcgattgattgctggcataacggtggacgcccctatgtgatggttggcgctatggagtcgcttaaaaccgactttatccatgctcatattgagcggcggtaagggggtaacatgcaaaatccatatgtgcattatgccggcgacgggctcggtccccgcgatgtgtttgtgaatggaaacccgatcagacatgtcgtttacgcaaaccaggcaaagggtgttgtagagtttgctccgctcccgctgcgggttaagcgcaatggcgaaatttatacccgcaaactccacggtacagtgatcgttaaacctcagcagcgtattggtgggtgcaatgggcattcgtgacgagctgcaaaccgaagtcgccgcggcattcgataccgacctgcaggatgccgttaaggatttcactgggtcatataccgttcggggtgcctgggacccggtgacggaaaccggcactgaaacgcaggtgacttactcggggcgtggagtactggcgcgctataagctgcgccgtatcgatggcgttaacattctgcatggtgatgtgaagctaaccgcactggttaacgaggtgactgataagccggccgtcgggcatatcatcaccgcaccggatccggttacgggtgagcttcagcgctacgaggtcatcaccgcttctgccgactctgctggcgctgcgtactccattcaactgcggagggcgtgatatggctaagggctggaacattgacccggcggcattcgccgggctggtggcagaagatgtcaaactacgccagcggacaatcgccattcagctgctgaatgaaatcgttcggcggtcgccggtaggaaacccggagctgtgggccattaacgcgaccgcggttcagtacaacaaagctgttggggaatggaacgaatctctttatgccgatcctgccaacctgacaaagacaggccgtctcagaaagaaagtccgtgttaatgacagcatggatatcaggcggccggctgagtatcgcgcaggaaccttcagggcatcgcatttcgtcagcatcggcgaacctaatcattccgtcccgaccgaaccggatccgcgcgggacaatgacgtttcttaatggcaaaaatatcattgaccaggcgccagcctactcggtgatttacatccagtcgaacctgccttactccgtgcctctggagaatggccactcaacacaggcgccgacaggcgtctatgccgtctcgtttaatggtgttattcaggcctacaaatgacccttacagaaatcagaaacgctgtcatttcccgaatggcggcacagaccgctattgcctctgatgcggtggattatccgaatggcccggtatttgaccccagtaaccgcgatatctgggcccgactaaccaacattgctgggcaggctggcgcaaccgagatcggggacgggccggtagtccacaggacgggcttactcatcattcagctttttgttccggtcggttccgggacgttgcttatctcccgaacggccgatcagctaacggagctattcgagtttaaggatgacggaaagctgagttatttcgctgtttctgctgtgccggcgggtgagaccgatggctggttacagctcaatcttcaaattccttatcgcgctctgtagcgcacaaaaaacaggaggctcctgtgagctcaggtgcaaaagtagtagccgcgtttattcgcgagacaacgccaggaatcacgcctacagcaggggcgtggaacctgctgcgtcgttcttcatttggtctgaaaccaacgcagaacaccaacgacaatgacgaaatcgctggtgaccgcatggcgcaaggtgtttcacgcggcacagtggatgtcggcggcgatgtcggcacgcggtttcgctggaaccagcatgatgattttcttgccagctgcttcggttccgaatggctaaataacgtgctaacgatgggtaatggtcgcattacgttctccgtggcgacttttgccagtgatgtggggatcgcccagattgcccgcggttgccaggttggcaccttccagatggaaatcccggccgatggtgatatcactgcaaccattacgtttgcagggctggactgggagacgaagggggacgataccagctatttcaccgcgccggtggatttagcgggggcgctgcgttactcctttaaagaggtcacgaacatccggctaaatggtgttgatggcgggacaggtttctgcgtcgacaccttcaacatccagttcaacaacaatatgcagactcagcgctgcattggtaccggttcggcattcgccagcgcaaacattccgacaacctttaccccgtcaggtcaaatcacgctgtcatggtcaaaggctgcctgggaggtttacaaaaaaacgttcaccggcgaaacggtgccgtttagcttcacgctggagaatgctgaaggcgcctataccttcgatttcccggaagtgcagatctccggcgactggccggatgcggggagcactgacattgttcaggttcagctggatatcaccgcggccaatactccgccaactatcacccgcgttcccaaagtgccggcgacggcaatcagtgttgcgccagccacttcaactggagcagtgggatctactgtgacgttaaccgccacgcttacgccagctgattcaactgataccgtccagtggacgtcatcggatccgactatcgccagcgtggtttctaccgggcagaaaacagcgaaagtcacacgtaacgcagccggtactgcaaccatcaccggtaaggcccgcacctttaccgcaacgtctgaaatcaccgttaccgcgccttaatttacctggcccgttctgcagtcatcgcggaacgggcttttttgggagtctttatgctgattatttcttctcaaattgatttgaacggagaacgctggttttacccttacaaaaagccagcaggaagtaaaaagaaattcacgccggaagacgaggcgctatttaaactccgtctgctggtggccagtagcgagaatccacaataccgctcacgcaatgcgctggtgcggcgccatatcgacaaaatggacgcgagctaccaggtcggtacggatgctttcgatctcgccagtgtgggcgagattgactcggttgatgatcttctcatcgacaattgcgcgcgctttcttctgaaagactgggaaggcgtgggggagctggtggatggtactgagacggccgtaacgtatactccggagcgtggtgttgcgttactgaaacaaaacccctctctgtactggcttattctggctgaggcggcgtccattgctcagggtaaggagcagcagactcaggaaaccgtaaaaaagccatagaggcccaaaaatggctaagggaattcgccggcgagcagggcgagaaagcaaagtggcgcagggagaaactaaatctcccgcccattccggagcctgaaatcgatgcagttactggggagatcatcagcgcttacgccatgatatcgcgcggcaggaagtatgccggcatggccggggtgccgctccctctatccctgaatgatattgagctttacctggcatcgcgcaccatcctgatcgagcgcattgagtttgacgcagcgatactggctctcgatgatgcctggagggctgagtgggccgaagagcaaaaaaggcgggcgatagtaaaataacctaatcattgtttagctgcctctatatgttaggatgtttctgattgtaatcacgggaaacataaaatgaagaaactaatgatggtaatagctgggatgtttgttatttctggatgcgctactaagcagtatccgcaagctccgtccgtaactagcgaagagtctgctgcgttagattgtgccgcaattaagcaggaaatcgcaaaaacgcacagcattcagaacgaaatcgaaactacaggtcagtttgatgggcgtaccgtattgggggctttgggagatttcggtatcggtaatggtatggccaaaagtgaagcgcgtaaaaaggcgcaggcacgtcttcagcagcttgaatctcttaaaactattaagtgttcagatagcaaagtctcaggttaattctggcagcgattgtctctgttgcaataatcgcaacaattatcgtatatcgacagtaattgtttattaaaaatctaacctcgccccggcggggttttttattgtccggagatcgttaaatgacagaacaaacctcccgccttgccattgttattgatagctccggagcagagaaacaggccgataatctcgcaactgcactggtaaaaatgacacaggcaggtgaacgtgctgccatcagcgcagtgaaggtgacaaaggccactgatgaagaaaaaaagtctctttctgaactcttagatcgcatcgacccggtaaacgccgccctgaacaaactggataaacagcagcaagatcttgcgaaattcaaatcaaaggggatggtagatgccgatacattcgatctttattcaaagaaaatcgaggaaacacgaaacaggctaactggatttcgtgacgaccttggaaaaaccggccaatcagccgcacagactgcctttgccatgcgcatgatcccagcgcagatgaccgacattattgtcggcttatctacaggtcagtcaccgtttatggtgcttatgcagcagggcgggcagttaaaagatatgtttggtggtattggtccggcaattaagggtgtgggcacctatgttatggggttggttaaccctttcactcttgcagctgcggcggtcggttttcttggtctggcctattacaaaggcactcaggagcaggacgaattttataagtctctcgttctcactggtaatctggtaggcaaaacctccggtcaacttgccgatatagctgccagcgcaggcattgctgcggattcaaccactggcaaagccgcatcaacccttaaccaattggtatcatccggcaaagttgctggagattctctggaacgcgtgacaatcgctattgttaagatcagtgatgcgacgggtattgctacagaaaagttggcgagcgactttaacgatctagctgctgatccagtagcggctataaccaaacttaacgaccaataccactttctgacactggcaacctacaaccagattaaagcgctacaggatgaaggtaatcagcaggatgctgctcgggtggctactgatgcttacgccaatgccatgcagcagcgtgcgaatgatattcatcaaaaccttggtcttcttgaaagtgcatgggactcgctgggtaaaacggccaaaggcgcctgggatgcgatgctcaatattgggcgtgaacaaacactaacggataaacttgccaccttaaacgaaaatattgctgaagcccaaaaagggcaaaaagatggtgggttctggaacagttttagcgcgaggtttaccaacctcccggagatgataaaacagagagatttgctcgaatcagttgccaatcttcaggggatgtaaccaaaggacaggcgaaggctaaggaagccgaacagcaaagaattaaaacgcagcaagaagcagatcgcgttaaccagcaatatttgagcaatgcggataagcgcaataaagctattaagcagcaaagcgagttcctgaaggctggtgcaattactgcagagcaatacgcaaaaaacgtctcacgtattaacgagatgtataaggacccaaaggcacctaagcaaaaggtctatacagaggacgcggcaacccggctgcttgatcaaataaaccagcagacaactgccttgcagtcccagctggatgccagtgacaagcttaacagcgcaacccaggcgcgggtaaagttcgaacagcaaattgctgacctcaagtctaaaacgcagctcacagccgaccagaagtcgattctttcccgttcagatgaaatcctccaggcgtataagcagcaggaggcactgcaaaattccgtaaaaaccctggacgattaccggaagatgcaggaacaggtaaagacgaaggatgagcggaccaacgatctgcttaaaacccgtcttgaactgctggagaaggccaaagcaacggggcaacttaaacccggtgaatatgaaaaaacgcgggcagatatttatcaaaacaccgatatgcaactgccctcgacggttcgtaatgttgtaggaaacctgacacccacaggagggcgactctctggaacttttgaggggatgcaggggcaaatcaacgaatatgaccaggctcagcaagagctccagcgctggctggcagctcaggaggaagcttatgcgaaggccggcgaaataactgccgagggtgaggccagaatgacctcgattcgtcagcgtgcagcggatgcaaatcaggtcatagaggctcagaaaaacaccatcatatctgcggccacgcaatccttgtttgacagtaccgccgacatcatgcgaactgggtttggtgagcaatcggcaatctacaaggttgcttttgctgcgagcaaggcattcgctatcgctgactctatggtgaaaatccagcaggctatagcaagtggggcagtaagcgcgccttatccggccaacatcatcgctatggcctcaatcgctgcgcagactgccagtatcgtctcaaatatccaggctgtttcaggagttggcttcgcctccggcggttacaccggccccggtggtaagtatcagcccgcgggtattgttcacaaaggagagtacgtcttcgaccaggcgtcaacgaaccggatcggcgtgtctcagcttgaggcacttcgaaatggccaaccgcttgatgcaactctggggcgtacagggtttggtactggtgtccagaacgttaacagcgataacagcagcaagaccaccatccatgctcccattgagcagcatttccatacgccgcccggtgtgacacctgatcagatggctctctccatggctcaaacgcagaagcgggcgacaacggaagccctggatcaggttgctgcgcaattgttgagaggggacgggaaagttggtaaggcaatgcgcagtaaatattcaggcagagggttagagtgatgactgatatctactacccgcatgatagtcttccgatgccattacaggaaggatacggattccagcctgtaagcccgttaaaacgaacacagttgaccaccggccgcgcgcggcaaaggcgagcttatacgtccacgccgacgcaggccagcatcacctggtttatggaaaccgatgcgcagggactggcatttgagtcctggttccgtgatgcgttatctgacggggctgcatggttcatgatgaagctgcagacgccggcaggcattaagttttacaaatgccgcttcacagatatttatcagggaccggtgctggtggccccgatttactggaagttcacggcgacgcttgaattatgggaacgcccccttgctcctgccccatggggtaattacccggaatggatcgtcggcagctcgctgctggatattgcgctgaataaggagtggcccaaggcttgattaaaaccgtttctccttcataatcacttgtgtcgatttgtgggaaagtccttcatgccgctccgtagccggagcgtgaaataaagcgcggaatagcgatcctgccggtgagggtacacccacattcgacaccaatttttaaggtcaccttcgggtggccttttttattgggtaaaaatcatgacaagactcaaccgcctctacgccagcagcggaccggaggtgatcattgaaacgctgcagatcaccattggctctgatgttcactacctttgccagggttacgacaacatcacggcgacgacggagaacggcgataccgtaacgttttcagcctgtgcgatagacattgcgctgccggcgcgcaatgcggacggcacgcaggacctcaaatttgccttgtgcaatatcgatggtgttgtgtccacggcgatccgcaatgcgctggctaaccgtcagtctgcatttctgacgtaccggtgttatatctccacggatttagcggcccctgcggaagtgccgtatacgctgaaaatcaagtctggttactggactgcgaccgaagggcagattaccgcgggttatatgaatatcctcgataccgcctggccacgttaccgctacacgctacctgtattccccggactgcgttatatcagctaaggaattccaatgttcaaccctgataaataccgttctgttaaatggcagaagggcggtcgctcttttccaaaacttgactgcttcggcattgtgaacgagatacgccgcgacctgaatttacccgtctggcccgattttgccggggtcaccaaagacgacggcggcctcgaccgggaagcgcgccggatgatgcttacccttgagcgctgcgaaccctgcgaaggggctggggtggcctgctattccgggtcgaccgtcacccacgtagggatcgtggtcagtatcggtggcctgctgcatgtggcggaatgcaacccaggcacgaacgtcacctttctgcccttgccgcggtttaagcgtcgatttgtcaaagtggagttctggcgatgaccattcgtttttacccgtcccggcttcccggtgaaccactcgaaacgcatgagcatggtgtaaccagtattcgcagctggctggtggcaaatgttgaaggctacgaggatcgggatgtcccaccgctgaccgttgaggttgaggggctgttaattccgccaggcgagtgggctaagtgtgtgattcgccctgatagtgatgtcaggctttatccggtgcctttcgggcttgaggccgcgacaattgcctggataggagtgggcattgccgtcgcatctgcggcttattcattgttcatgatgagtaacattgatgccggcggctatacatcatccacaggtcgaagcctcgacctgaaccccgctaaagcaaacagcgcgaaactgggtgatgcgattcgtgaagtttttgggcgcgtgcgtatttatccggattatgtcgtgcagcccgttacccggtttgatgccgccgatcctacgaaaatgcgcgtccagatgctgctgtgtctcggtgtcggtgatctgatttataccaatggcgatatcagggttggcagtacgccagcttcaacgctaccgggattcagcagcacccattacccgccaggcgcggacgtttccggtgatgagcgcagcgaaaactgggtcaactccaccgaagtgggcgggacgtcatccggcaccgggctggatatggcccagacgtcgccggacgcagacgacattatcgcagacagcatgaccgtatccggttcgagcgtaacgtttaccgggctggacacggatgatgatgacgataatgacgagaacgataacgcgctaccgcccagctgggtcgccggcgccgtggtcgaactgaaagccccggctaactaccagatcacttcggcggctggatacagtgttatcgccagcccgctgctgacggagatcgcgccggtagtaggtatgccggtcacgctggggtttaactctgtcgattacgatctgtttatcgcgtcatatacccccgctcaggctgcagtgcccggcgccggggggagtgcggcaaaactccaggccagtgcggccccgaccacctacgatttttcgaccagctccagcacgttcacgatcacctggcagggggttacctacccggtgtcgctggtggctaactacgtctctatgtcgggactgctggcggccatcaccgagggactcactggctccggcctggttgcgcaggacaacggcggaactgtactgataaccgagtcggccagtccgttcgcgggtggggcgatcacgtcctcttcactgcctgcagctgttttcggtgatgccccggtttacacctccggcacggcatcaaccggcggcagcccggcggtaacggcgaatgtgacactcgcctataactctgccacgggcaccgcattctccgggatgccggagggggtgcaacggctttcacttgctcactgcgggaatgagtaccggattgtgtcagctgacggcacgacggcgtcggtggcgcgcctggtttccggtgccgttgatgagtcatggccgggattcaccgcccggacgatgatcgactatgaggcttctggtcttaacgacacgctgagctggctggggccattcctcgtatgccctgagaatgaagtggtggatgcattcgaggtgaatttctccttcccgaacggcatctgtggctttgacagtaagggcaaaaaacggatccgccacgttgagtgggagattcagtatcgcgtctacggttccggttcggggtgggtgagtcaccagggcgagtatgcgcttaaaaacgtcaacgggctgggattcactgagcggatcaccctcagctcaccagggctggtagaggttcgctgccgtcggcgcaatgagcagggctcaaacaacgcgcgagacagtatgtactggcaggcattgcgcgggcgactgctgacacgaccttcatcctatcccggcgtgtcgctgatggcggtgaccgttgagacgggtgggaagctggcggcacagtcggaccgccgcgtaaacgttgtggccacgcgcgcctatgaaaccggaacggccagaactatctcgggggcgctgctgcatgtcgggaactcgctggggctggagatggatgccgacaccatcaacgcgctggagtccgcgtactggacgccacggggcgagtatttcgatttcgccacgggcgacagtatctcagcgctggaaatgctgcagaagatagccaacgccgggaagtcacgttttctgctgagtgatggcctggctaccgtaagcagggaagggattaagccctggaccggagtgatcactccgcatgagatggtggaggagctgcagagcggatttaccgtaccgtccgacgatgattttgacggtgtcgacgtgacgtacatcaacggcgtcacctgggcagaggagaccgttaaatgccggacgccggacaatcccacgccggtgaaaatcgagaactacaaacttgatggggtactgactcaggatcatgcctaccagatcggcatgcgtcgtctgatgaaataccttcagcagcgggtgacgttccagaccactaccgagctggacgcgctgtgctacaacacgggcgatcgcatcgtgctcacggatgatattccgggtaacaacacgatttcctgtctggtggaagcgatgacaacggctggtggcgtgacaacgttcaccgttacggagccgctggactggtctttcgaaaatccccgagcgctgatccgctatcaggatggatttgcatccgggctgatggtggcgagcagggtgggtgattttcagctgtcagtcccgcacctgagcgagtttgatgacccgatgaaggttgacctgtcgtcggcaaccatcgagccgatccgcctggtgttctgcggctcaacgcgccacgtctacgacgcccttgtagaggagatcgccccgcagtctgacggaacatgccaggtcaccgctaaagagtacctcgaatcgttctatgcctacgacgacgctacataccccggcgacgctgcttaataccaaaaaaatccctttcaacttttctttcgctcaaaccctcgtttgggcgaacaccgttttggagcaaaaatcatggccgaacttaacccgcctttgggaacgacgacgcctgcaatattcctggataacgtcaagcgcgctgacgagctggttaacggtccggccggaacggttaacgaccgcgcaggcgaaccgctcgatacctggcgccagatgatggctaagaatgacgaagttcggcaaaacatcatcccgctcagtaagcagtatcaaacgctggaggctgcacaggcggatatcgcgaatattccggtgggctcgaccacgtactaccgtagcccggacgacagcgcgctcgcaatcgaggtgatgaacgctggcgggacgctgcagcctaccgggcgccgtatgccttcatatgacctggtggcggccatcagccaggcagtaacggcggaggtcatggcccgaacaggtctgatattcagcagcgatgaccagaccatgctctctttgtgcgatgaatggggatatgaagccgggcggatcactgagaacagtttcgaaacgagaaaactcagactgatccagtcagagacaggtccgctactgacgctggttgatgatttcggttatgcggtgaatctgttttccgaaagaggcgcgctggttgccggaaataatgagttgtcagattcagagtcgcttatttccttccctgatgaattcgggaacgagctgattctggttgataagcaggggcggctgtatgccggggataacatcatatttgacgcgccggactgggcacgctgtaccgttgaccccttcgggtatgttatcgaaggcgtgaaattaaatggtgatgtggtcagcaagaatggaggcggcggtagcgtcgaacctgtgccctctgtactggagagcagcgcagcagcgcactggctgtttggctatgagtccacgtcgtatacaagccgtgtggggtataaaacgctgacaccgcaggccgcgccggaattcaataacaattacatttcgatctccgcctggggcggcgcgctgatgaccgatatccccgatgccggggaatacactgtctgcgcggtggtcagggtacctgaacaggccccgttaaccgactgcgtggtgatttacggcacacagaacgggtattcacttcgggatgacgacgacacctacaccggcaatcagctgtcgatgttttccgacagggatgatcggcgatggctgcgtgtgaaaaattccggttaccggggaacgtcccggcattatccgacactacagccgcctgtcggccagtggctgttcatttcacatgtggtgaaacttgagggcagcggactgcgttaccaggcaatcagcgtgggtggcgaagaatatcagatgctgcgcgaggccgatgcagatcgcctgattctttccggccgcaacatcgccattggcaacgggtggtgtgataacgccatgttcaaaaccaaaaatctcgacatcgctgaattcatctacttcgaccattcgctttctgcgcaacaggtccaggccgtttatcacaattcccgccagcgtatggctgagcgcgcacttaacttacagtaaaggagtctccctatgggcacagcaattatggccgctggcactgatgcatcagcgtacgcaaataattatcttccgccggtcactggcccgctagcctgggccaatctggaaagcgatctgctgccggcaggtcggcgccttaaaaacttcggtagcctcggaggtacctttgcgctgtccggtattgctcagctggtagcaaaaggtgttgcagcggcagcgggtacggaaagccgtctgactctgggtacctttacgccggatgcttacaccttcatcgtgctggtcgacgtgggcccggatgcagggatactgcgtcaccgcaatattcgtatcagcacgaatgccagcaaaaagcttcagcgcgtcatggatgccggtacaagcgtttcggatatcactgcgcctgcaacgggcgcgttcgccgtattcctgtgtggtgacagcaccgggcatgcgtttggtattgtgacggcttcaggtattcagaaatccacctccacggcggtgaacagcgggacgactgccacctggatgggagggaccaatcaggcaggcctggcagcagcatgggcaggctatggttcggctttctatgaccgaaagctcagtgacagtgaaatggaacgggtggcagaacgccttattaaacgggcgcgttatctgggagtaacggtgaatggctgatttgtcgatttcggttatttcagaccaggcatctgagagcaatcaggcggggtggtggcatccccttgacagctttcagggagtggaatgttacgggctgtgtaaagagtacggtaccgccggttatcatcaggtcgaaatcgttcgccgtgatgccgatggtaccctcacgcggggaatgtgtaagaacgtcgacgggacggtcgcggaatttaacaatgacgtgggccataatcagccatctgtggttgtggacggtgcgggatatatccacgtgtttacgtcgatgcacgttaacctgctgcggtactttcgcagcgcgcgccctggcgacgtgtcgcaaatggtggatgcgaccctggactttccggatgtggactgggtctggacgtacccgatcaccggcagaggtccagatggtgatgtatattgtctgatgcgggtcgccagccggagcaccaccggggaaaataaacgcgggggtatcctttaccgctttgacgtcggcacgctgcgatggacccgttatgcgcatgtggctgaaacagccaaccgcgctatttacccggatgatatagccattaacgaggacggcgtccatcttctgtttcagtggtcggcctacccgtcttctgccgtccgccatgtcggggaatatggcgtcattggtaccgatggactgatgagaacgataaataacacgcccctgccaatgccggtaacgcagggacagctggcgtataagccattgcagccgggtgaaaacccggcgataagtgacgggctgaaaatggggattcagtctgcgaaatttgcgtttgatggcgaggggttgtcgcatatcacttaccgtttcagaaccgtggatgatccttccgggacctggttcagtaagttcggggtatacgttgcgacatgggctgggtctgcgtggagcgaacagcagatcgcgtatgtcccgccggagaggggaaacacttccgcagcactggcggcaaccgttcaggggggcaagcagagggtgtatttttcggtggaatacacgtcttccgggaatactgtcgctgtcattgtcctggcggaaaatgcaggttctggatgggtctactcggtactcggcaacagcgctcccacacttctgcgcctgggtgctgcaccaggaaacggcggtgacgtgctttacgtctcggcaccgtttgaggctaaggtgtatcgctattttgtgccggaagattattccccggctcagcaattcacgagttttgatgtactgctgtcgactctggtgtaattaaaatcatcccccggcagtctccgggggtatggttaactaaaccttcccgacacagccgccatctcctccgcaatgacctgcagcgctgttttgctgaccagagtcagatcgtcaattcgcgcacggtaaaagcgacctgcaaagggtgtggtatccgccaggtttgaaccaatgccattcaggttgatagtcgccgtcggataggcaattttccccgtccagacgccctcataagcaaggaccccatccagataaaccagccccttttgctgcgtgccatcagccgactcctgatagcggacgctcaggcagtgcagattgccgtcggccagactgccgatgtaatccttaatgctgtagttaatgccacgcacgcacaccgtcagcgccgtgatcaccccagccgtgatggtaggatagacctgaatcagccggttagcggtagtggcgtaactggttgccccaatccccacccagacattactgaaaccatcagcgccagcattcgccggatcgattttcagccagaacgtatgcatgtagtctttcatggccgctgtcggaataaaccccgcaggcaggcgcaggtactggcgcgacgttttatcgaaaaccagcccaccggaagtgctgtcaaagttcagagctaccgaacccacgctggccgggtcatccagaaagcacagatttttgagctgggcaccgggagccaggttcttcgcccctcctgcccagttatgtttcacatcgatcattcccagcgtaccggcattgatggacgggaaataatataattttgacccggtgtcgttcacccagtcggtgctctgttcgaccttacccattatttaacccatcctttatgtttgagaaactggcaaacgaaatttgcgttgacttctgccccgacgtacagcgcgccactcatcagcgtctgtgacggatgcagcgtgtcgtatttcagggaagcaggtgtggtgtcgtcggcgatattctgcacatcggttgcattcgccgggttgtagtggtttttgaagttctgcagcagatcaacgccatcaatttcacagtagtactccggaaaggccgcttttagccctgcgtttatggcatggatacgctgatagccagcagaaccgcgagtttcatcaccgcgggtaaactgagggcagatacacggcagcgcaccaagcggcttcaggtaactgacgatacttttgacgttattcaccacttcgctgacgctggttgtgttgttacgcccgcaggtcaggatcagaatggcctcatcgtgctcaggatacagtacgccagcagggcgattcttcttccacgtcatgagcgccctggcggaaatggagcgagatctgatagtggagaggacacgcgctggactggcggtagcaagagagcaggggcgtatcggcggatgtagccgggtaatgacccctgatgttgtcgattgggcaagccgaatgctggagagcagtgttaaccgataataggtctccaaggtgatcgacggatgtgtgaggactatttataaatatttcccggtcaccagtaaaaatcattgtgttgtgtcggtgtagttgatcgatagacgataactgtattgatctgtattcgagatgaaactactgtgtgtgcaaccagtattgactagggggctaccatgctcctttattcaaattgatgagattattacgaaaagaaataccatcctgagccaaaacatcgtgcacgtgcaagggagtgatttttaatttggtgttgaagtagcatatgacataaatttttatcttataatcgtttattttggtgagttatgcgtaagttttgcttacgcataattattatcnnnnnnnnnnnnnnnnnnnnnnnnnnnnnnnnnnnnnnnnnnnnnnnnnnnnnnnngttattttgcttcttaatagataaaataattctgcgtagttcacaccagattcaagccccctaaaggatgctaatctccttactgcatccaatgatatcagtgnnnnnnnnnnnnnnnnnnnnnnnnnnnnnnnnnnnnnnnnnnnnnnnnnnnnnnnnnnnnnnngtttacttatatctacataaatagatccagatgattgactccatgatcctgaatccccccagccagcaggtggatactcatatgctattacagacttgggtgaatcagcattttttgtggtcctggtggctgcgattgagcattcataaacccatttatgctcctgatggaatgaaggtacagggatgaaaataatatctggttttatattttcaataagtaagtcaatcgcatttacacatctacttttactggatgaacacaaatcaaaatcctcattatcattaattttatttatgatatgaagagtcgccccggcttcgagcatggcgtttgtaagttctttttttctcgtttcactgctaacatagataccatttctcnnnnnnnnnnnnnnnnnnnnnnnnnnnnnnnnnnnnnnnnnnnnnnnnnnnnnnnnnnnnnnnnnnnnnnnnnnnnnnnnnnnnnnnnnnnnnnnnnnnnnnnnnnnnnnnnnnnnnnnnnnnnnnnnnnnnnnnnnnnnnnnnnnnnnnnnnnnnnnnnnnnnnnnnnnnnnnnnnnnnnnnnnnnnnnnnnnnnnnnnnnnnnnnnnnnnnnnnnnnnnnnnnnnnnnnnnnnnnnnnngaatatccattgcaactcttcgcttgtattttacctcatccctgccagaaacttgccatatcccagttatacccggcgtggactttttataatactcaattttttttccgtacttatctgcttcatattgagatataggcnnnnnnnnnnnnnnnnnnnnnnnnnnnnnnnnnnnnnnnnnnnnnnnnnnnnnnnnatctatgctcgtttttcttatccattttccaaatttagttacacgtgggtcattcttcatgnnnnnnnnnnnnnnnnnnnnnnnnnnnnnnnnnnnnnnnnnnnctattggcaaggttgatatgtctttcattgatgtaaatttataacaattaaacatgcatccatttagcccgattcttttactcctataaataggagggtgtccacttaatgaaataattattgcaacaccaattaagacaggtgaaaccattagtatcagaagtagtgatgcacacaaatcgaaaatccttttgcttttcatgaatcccccgtgcaattatataatgattcaatatgttacaaataaacacatttatacaatagttctataaggcaaatagatcaatggtcgagtaaatggattcatgatttaatcatttaatgcgttgataattatggggaaaattaggttttggtaatcccggctgatgtgggaagggggtattgagcgaagttgcagaatgctggagaacggcgctacccggcagcaggtggctgatgtgacaggcgtggacgtgaaaacaatctacaagtacctcccggcgacttgaagacaaagatttcactacttttcctgatatgttacgtttggcttgatcaattcattcagctttgaaaacagtttggtttgtttgtgatgagtaagaaaataataagttttagagattttctaactattaaccataaccttatgcacatgtccgatacatgggctgatttgtgggcgttgattttttacacacgtttaagtgcgggaaggctgctgtcactccgttacgatgacattgatggttgttcgataatgatacgggaaccgggacatctgaaggcgctacgtgttgaatcaacccctccagtggaggggatcattgctcgtagaagagaacgctatccagaagatgtttttttatttcagagccattctaaccgtgtgaagtaccaacgccggccggtcactataattgctttcaacgccgctttacgtcgcgccgctagatcattaccagacgttaacgtaagcagtagtagcgcgagaaacataccggactaaccgcctgtccagtcgcgtgtggccgatgtgacaggcgtgggggtgaagactatttacaaatatttgccagtacaatacggcgataaaaaatccccttgagcaggcacactcaaggggaaaatactacataacatcattgctgtgtgcgtcttcgcacacccctatcttctaagaaggcgcccaaagcttccagatatttctggtctgagcagttaaaacattggatcggcggcctatgtgataagagggggtgaagacgatttataaatattttccagccggttaagtttgctcacctgcgaaccgtatgcaagagatcgcaggtgaacaatttgctatgaaggcattgccatagctgaaaaattttaacctcgcattgttcgcaaaaccatcaaacagctaaggcctgaaaacactttcagactaaccttactcgttacatcaatgtgttacgtcaatggcgtaaattgatagccagagcctatattgatatgtcgccctgttaaaactactgtatataaaaacagtgttaatctgagcgagtcaattatgcagttttacacgcccgttgagttacgtgagatcatgctgatcccgttgtacagtgaccttgtgcaatgtggttttccaagccctgcacaggattacgttgagcaacgcatcgatctgaacgagttgctcgttaaccaccccagtgcgacgtattttgtcaaagccgccggcgacagcatgaaggatgccggcataggagaaggtgatcttcttgttgtggatagctcaaggacagcagttcatggcgatatcgttatcgctgcagtggatggggaattcaccgttaagaagctgcagctgcatccgcgggttcagcttaacccaatgaaccctgcatattcgccgatagtcgtgggtagcgaggatactctcgatgtgttcggggtcgtaacttacatcatcaaatcggctggctgagatgtttgcactttgcgatgtgaactcattttacgcatcgtgtgagacggtgtttcgtcctgacctgaaagggcggccagtagtcgtcctttccaataacgacggttgtgtgattgctcgttccgctgaggcgaagcccttcgtcataatgggggagccgtacttcaaacaaaaggacatgtttcgccggcacggcattatcgcgtttagtagcaactatgagctctatgccgatatgtccaaccgagtgatgacaacgctggaggaactctctccacgctgcgaaatttacagtattgatgaggcattttgcgacctgacaggagttcggaattgtcgcgaccttaccgactttggcagggaaattcgcgagacggttctgcgcaggacgcacctcacggtcggtgtcggcatagcccagactaaaaccctagcaaagctggccaatcacgcggcgaaacagtggcagcgacagaccggaggagtggtggatctgtctaatcttgaaaggcagaggaagttgatggctttgctgccggtggatgaggtctggggcgtcgggcgccgtattagtaaaaagctggaggccatggggattaaaacggtactgcaactggcggataccgatatccgttttatccggaagcattttaatgtggttctggagcgaactgtgcgggagctgcgcggagagccatgtctcggtcttgaggagttcgcgccggtaaagcaggagattgtctgtagtcgcagctttgggcagcggatttccacctacgaagagatgcgcctggcgatatgcagctacgcctcacgtgcagcggagaaactccgtggtgagcatcagtactgccgctttatctcagcattcgttaaaaccagcccctttgcgctgaatgaaccgtattacgggaacagtgcatcggtaaagctgctaacgccgacccaggacagccgggacatcatcaccgcggcgacaaaatgtctcgatgtaatctggcgagacgggcatcgttaccagaaagcaggagtaatgctgggagatttctacagccagggcgtagcgcagctcaacctgtttgatgccaacgcgccacggaagaacagtgaaaagcttatggaagttctcgaccatctcaacgcgaaggacggaaggggaacgctgtattttgcagggcaggggatccagactgcctggcagatgaagcgtgaaatgctttctccgagatatacaacgcgtattcaagatgtgctagttgtaaaatgataggagttagtatgtaataacaccttgataatatcttatggctaacttaagtgaggtgtcatgtatatggcaaagatagggcgaaatgattcatgctggtgtgggtcaggaaagaaatataaaaaatgtcacttgggaagagaaaaggaaaaaaatatagatcgaggcgatgctaattcagttcttaaactatttacaaatgtaagtaagtgtagtgttcctgatgatttaaaacacgaatgtgagcgcaagatcgttaaggctcatacattatcaaaatcaaatagtctaaaggaaatcgcaaagaatggtcatgtattaggaacaagtaaaggttttgatgcatttgaaaggcataatggtgtgcttagttttgataaaataggaattaacaaagcatcaactttcacaggattctgttcttatcatgataaaatgcttttttcctgcattgaggatgaagagtttatagcaaataacaagcaatgcactatgcttgcttacaggcctttgatgagagaattctatgttaaagaggcaaatctaaaagttttagaggcaagcaggatattcgatagaggatgggacttccaggctcagttggcatgggcaagacaagtgaatgagaatatnnnnnnnnnnnnnnnnnnnnnnnnnnnnnnnnnnnnnnnnnnnnnnnnnnnnnnnnnnnnnnnnnnnnnnnnnnnnnnnnnnnnnnnnnnnnnnnnnnnnnnnnnnnnnnnnnnnnnnnnnnnnnnnnnnnnnnnnnnnnnnnnnnnnnnnnnnnnnnnnattctaggtaacgaaattcaagaaataacaaaagaagacgcgagacctgaatatataatcacaaatgttttagctttagatggtaatggttacgtgattttttcatggttaccagaagataataacgtaattcaaaagtttattgcatctattaagaaatgctccagacatctcttaggtgacaaacttacaaatcatatcctttcatttatggagaatgtttttgcatcagaggagtggtgggactctcagggggataaacagggatatataaatgagttattgatgcagggagtaagaatgcatgtttatgatttaggacttatttctcatgattataataactacaatgctataacagtaaatgaaataattgaaatttaattaaagaatgtttaatttatattttttaatagttcagcgtattgatttttcacattaccaactgcgcttgaaacagggtgccaagtaaaatggtcggttggcacggcgccgtcgacggctatctcctcagcctctttccctcctatatcctgtctcatccattccctggctgcttctggtgacaacaccagcggccggcggtcgtgaatatctacgagcccttgatctgctgcggcggtcactatcaaaaacccttcggcttcgtcgccgcgctcaaaaggcacgctaccgatcgccgccatgaagattggctggccgtcggcgcgatgaataaagtaaggctgcttcttgtctccttcgcgcttccattcaaaccagccatcggcaaaacatatcgcacgaccgtgctgccacagaggtttaaactcactgctgttggctgcggtctcaaccctggcattaatcaacggtggtttatcccaccacccgggtgcgtaaccccagtgaaccggatcgaggtgcagctgttcgtctcgttcgctcaggagcaaaactttagtccccggcgccacgttataacgcccaatcggctcagggtcgtatgcgatgtcgcgctcggcttcatccgctaggtatgccagatattcttcatgggtttgggattgagcaaatcgtccgcacatggttacctccagtcttcagactgaaagtatagaaggtgtggaggaaacgtaggaggggaactccgacagccatctaactgatgactgtcggagatgacgtcaaaaacaatgtgtacaaaattgtgtattaaaatcaggaaaattgcacaatttaaaagtttaactcattgtttttaattgacaaaaataattattttgtaggtgctatcgtagggcataccattccttatgtttcagtgggttagccatggcaccgagaatatcggaaatcacgttgacaataatcaccagcgcgccaatcaccatcactccggcggagatcgccgcgtagtcctgctggcgaatagcgttgatcagccagcggcctagtccaggccagctgaacaccatctcagtgatcatcgccagggtgagcatggtggaaaactgcaggccgagacgcgggatcaccggcggcagggcgttgtgcagcacatggcgcagtagaattttgcgtcgcgacacgccgcgggtggcggccgcttttacatagttagtgtcatacacctcgctggtgctaatgcgcatcaggcggatcacttcagtggtgggggcgaccgccagggtcaataccggcagcaccatatgccgggcggcgctgacgatcatctcatggcgccacggcgagtccgaaagccaggcgtcgatcagcgcgaaaccggtgacatttttcacctcatacagcagatcgaagcgaccggagaccggaagccagccgagggtcagggaaaagaagagggtcaggagcagcgccagccagaagaccgggatcgagaaaccgaccagcgcaacggcgctgatcagggtatcgggccatttattgcgcattacgccggcgatcatccccaccggaatgcctatcagcagggcaaagccgaaggcgaggatgcacagctccatggtcgccgggaaaacctcgcgcaactgctcagaaatcagctggccgttaatgctggagacgccgaaatcccagtgcagcaccccttcaaaccagaacagccacgcattccacagagaagcgccctgcagtggggcatgaggggtgaaatagctcaggctgaaaccgacaaaggtcagaaaaaagagggtgatcagcagcagcagcaggcggcgcagggtaaaaataatcatggctttttcacctcttcggtattttcccgcgatacgccagcgaacgaagcgttaccgaaagggctgagcaccaggcctttcatatcatagcggtaggcctgcagccgcagcgacgaggccagcggcaggaccggcagttcgcgggcgaggatccgctgcgcctctttgtaagcgtccatccgcgaggagagctgctgcgagagcagcgctttttgcagcacgtcgtcaaactcccggttacaccagtgggcaaagttggtttgcgaggcgatggccgcgcagctcagcagcggtcggaagaaactgtccggatcgttactgtccgtcgcccagccggagagcgtcaggtcgtggctcatatccatcaggcgcgcctcctggaaacgtccctctaccggcacaataatcaccttaacgccaatctgcgccatatccgcctggataagctccgccgttttcagcgggctgggattccacgcctgcgagctggtgggcacccacagcttgagggtcaggttttccagccccagggctttcaggcgggcgcgggcctcctgcggattatattcggtaattttagcgtcattatcgtaggcccacgaggcccgcggcagcatggacgccgccgtctccgcggtgccatagtagatagactgcatcaggcgctggttgttaatcgccagcgccagggcatggcgcacctcagggttatccagcggcggcttggcggtgttgaaggccagccaggcgatgttcattcccgggcgcagcgtcaggcgcaggcgcgggtcgtcacgcaggatcgtcaactggctggcggctggccaggccagcacgtcgcattctccggtcagcagtttcgacaggcggccggtgccgccggagccaaggtcgaccaccacctggggcatcaacggtttgccgcgccagtagccggggtggcgctgcaggcgaacatattgtccggagcggtaatcggatagctggaacgggccggtgccaaccggctggcgatccagttgctcctggcggtcgtcctgcgttaagcgggcggcatattcggcagaggtaattgacgcatagtgggtggccagatgccagaggaacgaggcgtccggccgcttgaggcgaaactccacggtctgattatccagcttgcggacgctctccacgctgtcagcaaactgcagactgtcgaagtaggggaagctgctgccgttgacgttgtgccacggatggtcgcggttaaaaatacggccaaaggtaaaaatgacgtcatcggcattaaagtcccgcgtcggggtaaaccacgccgtgcgttgaaacgggacgtggcggcgcaggtgaaagcggtaggtggcgccgttatcgagaacttcccagctctccgccagctcggggaccagccggtaggtatagggatcgacgtcaagcagacgatcgtagagctgagcggccagcgtatcgacaatcaggccgctgctgactttctgcgggttaaaggtattaacctggccgctgacgcaatagacgaaaccgctatcgcggatatcggcgcggtcggggagcgcaggggcggcaaaagctggcccacacagcagggaaacggctgccaggagagatgacaatttcaggcgcatattttctgtttgattatagagctgaactctatcttattaagattaatagacattcaccaccgccttcaacaagcctgagggataatgcggttaccgggtgcgtatagtattcagtcaattgattaaaatagtcgcggaaccgagtctgtatagtgaaacatggtaactttttatcgccgatatcgccagtcagctctgtttggccgcggttgaccaaacggcgacgacgtgcggacgctagagaatagattcagtatagcggggagaaagccgatgacccgacgggcgactagccatacccgtcgggtgtgatacagggggagcgtgtttcgattattgtgacagtgtcactttatgatagtccatattctgcaggtcctccagcagcccggggccaaccggctgccactgcaagcgctcgcgggtccatgccgagctggcgcgcaggtcaagggcggtaaacggcgcaaaccagccgaaccaggcgtcgacctgcgagtcatccaggtgggtcagcggcaggtttaatccgtgggcaattaccgcggcaatatcgcgtaacgcgatcccctcttcggccaccgcatgatagcgctcgcctgccgcgccctgaagcagcgcgctgacatacagacgtgcgacgtcatcgacatgggcggctgaccagcggttgcttccctcgccgcgcagggctaccgccccgttggcgaccgcgcgttcgatgtagcaggtcagcagtccctgacgcacggtgtcatgcacctgcggtaagcggaccaccctgacatccactcccgcctccagcaactgctggccggcgagctctgaggcggtgcgcgggctggggtgccctgagttgaagaacgactcccgggccggggcgccgctcccgtcgtcgcccatcagcgtgccggaggtgatcaccagcggccgcgtgctgcctcgcagcgcctggcccagggccaggatcgcctggcggtctttctcgcagttagcggcaaagcggctgaagtcgtggtcgaaggcggtatggatcaccgcgtcggcgttcccgacgccagccagcagcgactccggggcatccagcgtgccgcgatgcacctcggcgccggccgccttcagggcctgtgcggtgctttcgctgcgcgcgaggccgataacctgatggcccgacgcctgcagcgccggaagaatacgtgagccgataaatccgctcgcgccggtaagaaatatacgcatcatggatctcctgaatgggtttcaggcgtatcctacctgcgatgtcatactataaaagtagagacattatcggggtataaattctaacaggcagaacccacaggcagatgatgaacacttctgacaaccatgctttaggcgattttctccgcgcccgccgccagcgtctcgatccggcaacgtttggcttcccggcgggacgccggcgcaccccggggctgcgccgcgaagaggtcgcgcagctcgccagcatcagcccgacctggtatacctggcttgaacaggggcgcggcggggcgccttcccgcgaggtgctggagcggatcgcccgcggtctgcggctgaccaccccggagcgcgagcatctgtttattctcgcctttggccatccgccgcagacgcgtctgacggtgacggatgatatgacgccgcggctgcagcgggtgcttgacgctttcaccattccggcgattatccgcaccgccagctgggacgtcatcgcctggaacgcgccggcggccagggtgctgaccgactacagccaactgccgctggcggagcgcaacgtgctgcgccgcctgtttacccggccggaggcccgctgcactctggaggactggcagagggtggggcagcttatcgtcaacgccttccgcgccgacgtcacgcggatgggcgccacgaaagaaactgaccagttgatcgccgagctcagccagcagagcgtcgagttcgcccgtttctggcaaagccatgacgtcgccggtcatggagaaggctataagcgcattaaccacccgcagatgggtccgctcgacctggaatttacctcctttgccgtggagggccgtcccgatctttccctgctggtctttaatccggcaacgactgagagccagcggaaaattcacggtttacttcagggggcgggatccgcgccggaggagagctgaggggtaaattcatacagcaccagcgcattgctctgcagcgagtcgatccgcagccaatagccatcgagcctggcttcatccacgctgagcgccggacgggcctgatgcatcagccactgataatcctcggcgtcagggccgctgcggctgcgaaaggcgtccaccagcgggaacaacgcgccgtggtgctgatcgaacaggtgctgtttgatgcgccagctgccatccaggccctgcagccgcacgctgtagggctggctgaagcgctggataaaggccgcttcgctggagagccagggattgtagaccaccgtattgcgcagcagcagctggtagtgaccctggtggtggagcagcagcaggtttttatcgtgaaccaggatctcgccgcgcagccgccgccagagccagagtacccagtaaaccgggcgcggaaggccgtgcagatagtgcagcgccaggctggaggtatcgagcttgccgttggcgcgagcttcgccctggaggcctgaatttaaccagaagcccgccagccagacctggtccgccacccccagcagattatccatcagcagcgcgccgcgaaaaaagcggccgttggtatcccgcgtatcgccggtcagcgtattccaggagagcagccacagcggcaggttgagctgacgctggcgcagggcgctgtggatctgccgcaacttgtgcagcggataatgttcactggaggccaggcggctgctgtcaacctgggccagatccagctgttcgttggcatctgcctggcaggcgagaaaatccgcctctgccagcagcggcgagtggaacagcggatcgttcccgggatcgctgggagcaaagcggtgccagatccccagctgcggctgcggcagcaggcgatgaaggaccccgcgctgctgccgccaggcggcctggcgcgcagcttcgctggcctgcggcgaccagtgccagacaaagcgccagctgttgagcgtggctggcggaaaatggttggcggcgagctgcaggaagcgctgcagcaggtcactgcgggtggtgacgccggtgtgcaggatcacctgccagcccatcgccgccagccagctaaaaatctgctgcaggttgtaccagcaggcgtagccggccatctgcggatcgtcccagccggtaccgaacagccgactgctgagaaagggatcgttgatatcgatggcatacaccggcagggcgtggtgcagctgttcgagttcccggcgcacatcttcgcgcagcagatcgtccagttcgcgcacggtcaccaccatccgggtatggcgcagcgctgcggggcgcgctggacgatcgcgcagattgatctcccgggtctgcggtgggttgatcggcagggggggactttcccggtcgcgtggttccggctcattgagtcgcgcatacagccggtcgaccgccaccggctgccagcgatcggcctgcggcgggcgcggtcgggcaagctccagaggatgctgttcacgatactggcgcggcgtcacgccgtgctggcgcttaaacaaatcgctcatcattcgcgtactggcgaatccctgttcgcgggcgatttgctggacggttttgcgggtggttaatagctggtcggcggcgtggcgcaggcgcagcgcggtgaggtactggacaaaactaaccccgacctctttgcgaaataagcgtgacagccaggcctcggagacaaattccgcggccgccacctcctgcaacgagaggcgacgctgatagttagcgtcgatccgcgccaccacgctggctattctccggctccatttttcggtatcgcgccggggcgtggaggcgatgggctggctaaagcgcgtggccagcagcagcgctatctcactcagccagcggttggcctccagtcggtaatggcctggatgattgaccaggccgctcaccagcagctggcgcatcaggcggcgcaggccgtcatcggcatcccgggtgcgcggcgttatctggtaatcgacggcaaaaaaggcattatcgaggcgggccagccagctggcggagagggtgaggatcatcacggcgttggccccggcgctgcgcaggctccagcgacggttgcggttaacgatcgccagcccgtcggcggcgagcggctgcgacgcaccttccgccaccgccagatttacgcttccctccagcacccacagcagcgtcagcagatcgctttccggctgggtcagctgacgcacatcgcgtacggtgacgctaaagtcgcctgaatggtgctccacatggctctcctctgtagacaaaaaacaaccggttgttttttgtcataaccgatatgtatgaaaaacactcattgatttttcgtcaatataaaacaaaaaagcgcgcctgcaagctgaggcacccgcataaactcgaaggtgtcgtgcaaacacaacacaggaataacaaaaatgacacatccgttgctagaagcattgcaggttaacgaggcgcaatttatcgctctgcgtcgtcggttccaccagcagccggagatcggctttgaagagcaccagaccagcagcgaggtcgcccgactgcttggcgagtggggatacgaggttcaccgcggcctggcgggcaccggagtggtgggcacgctgcgcgtcggcgaggggaaaaaacgccttggcctgcgggcggatatggatgccctgccgatgcaggagcggagcggtaagccgtgggcaagccaggttgaagggcgctttcacggctgcggccatgacgggcacaccaccacgctgctctacgcagctgaatatctggcgcgcacccgccagtttaccggcacgctgcagctgattttccagcccgcggaagagttgctgtacggcgggcgggtaatggtcgaggacggtctgtttgatcagttcccctgcgacgccatcttcggcctgcacaatatgccgggtcagccgttgggcaagatcggcctgcgcgacggggcgatgatggcctcctccgatacgctgcatattgaagtgaagggcgttggcggccacggcgcggtgccggagcatacggtggatgccacgctggtggcctgccatattaccctcgcgctacagtccattgtctcgcgcaatatcaccccgtttgaaccggcggtggtgacagtcggcagcatccaggccggtcatgcgcccaatatcattaacgatcacgtgctgatgaagctcacggtgcgcaccctcaatgagcaggtgcgcgagaccgtgctgcagcggatccatgatatcgccgtggcccaggcggagagcttcaatgccaccgccacgctgacccacgtcaacggcagtccggtgttgcgtaacgatccggcgacgaacgccatggtgcgggaggtggcgacagcgctgtttggcgcagagcaggtgggcgaggtgaagccgtttatgggcagtgaagattttgccttcatgctggagcagcacccgcatggcagctatttcaccatcggcgccggcgatgagccggatcgctgcatggtgcataacccggggtatgacttcaacgacgcgctgttgctgaccggcgcggcgctgtggtgtggcctgacggaacgctatctgcgctaatcacgagaaacgggagggccatgcgatgagcactgtcacaataagcgacaccccgtttgtcggcaacgatcgcctgctggtggggattgtgttaagcgttttaaccttctggctgttcgcccagtcggtgattaacgtggtgccggcgatgaaaagcagccttgatatctctcttgaaaccttaactctggccgtcagtctcagcgcgctgttcagcggctgcttcgtggtcgccagcggcggcctggcggacaagtttggccggatgcggatgaccaccctcgggctggggctgagtatcgtcggcagcgccatgctggtggtcgctcagggaccggggctgttcctggccggccgggtgctgcaggggctgtcggcagcctgcattatgccggcgacgctggcgctgattaagacctggtatgaggggcgtgcgcggcagcgggcggtcagcttctgggtcatcggctcgtggggcggcagcggtctctgttccttcgtcggcggggctatcgccaccggtctgggctggcgctggatcttcgtcttctcgatcgccgttgccctgctggcgctgtttttgctgcgcggcacgccggagagccgcagcgccagcgccagccagcataagctggacgtcggcggtctgctgagcctgattgttgcgctggtgctggtgaatctgtttatcagcaagggccacggctggggctggagcagcccgctgtcgttgaccatgctggccggggcgctggcggcggggacggtatttatccgcaacggcatgcgcaaaggcgaggcggcgctgattgattttgcgctgttccgcaatcgggcctacggtgcggcagtgctgtcgaactttctgctcaatggggcgattggcaccatgatgatcgccagcatctggctgcagcaagggcaccacctgacgccgctggagagcgggatgatgaccctcggctatctggtgaccgtcctggcgatgatccgggtcggcgagaagctgctgcagcgctatggcgcccggctgccgatgatggccggtccggtgttgaccgctatcgccatcgcgctgatatcctgcacctttctcgaaaaggcgctgtatatcggggtggtgttcgccagcaacgtgctgtttggcctcggactgggctgctacgccacgccatcgacggataccgcggtggccaatgccccggagaacaaaatcggcgtcgcctcggggatctataagatgggcagctcgctgggcggggcgatgggtatcgccgtgacagcgtcacttttcgcgctgtttttaccgctgggcatggcccatgccgcccagtatgccctgtggtttaacgccgtcttatgtctgggggcgatggcggtgagcgcgctgctgctgccgcgcgcctctcacagctgatgctttttcagcagcgcgcggagctggtgataggttaatcccagcagctccgccgcctgcttctgatgatacttcgcctgctccagactccgctgcagcaggcgtttttcctgctggaactggaaatcgcgcagatccagcggtagcgcgggcagctcatcgccgggcgcggcttccggcggagagccgggggactgacgaaaagggttaataataatcgcgtccagctcatgttcgctgtcgccgtggcgatacaccgagcgctcaaccacgttcttcagttcgcgaatattccccggccagcggtagccgagcagcgtcgcggtcgctcgttcgctaaagccgggaaacagcggcagaccgagttcgcggcacatctggatggcaaactggttggcgagcaacatgatgtcgctctgccggtcgcgcagcggggggagctgtaccacgtcgaaggccaggcggtcgagcaggtcggcgcgaaaatgaccttcctcgaccatctgcggcaggtcagcgttggtggcgcacaccagccggacgttaacctgcagcggctggctgccgcccacgcgctccagctcgccatattcaatcactcttaacagcttctcctgcaccagcattggggctgtcgccagctcatcgagaaacagcgtcccgcagtcggcgcgctcgaagcgcccgggatggcgcttgctggccccggtgaaagccccggcttcgtggccgaacagctccgagtcgagcagattatcgttcagcgccgcgcagttcagcgagataaacggcccctgccagcggctggagaggtagtggagacggttagcaataagctctttcccggtgccgcgctcgccgatgaccagcaccggtttatccagcggggccagccgggaaacctgttccagcacctcgagaaagctgttggcctcgcccagcagattatccttgtactgcgccatgatgaatttcgccattaagtagtgtaattaaccaggtgactgtagcaatgcccagcacgtttcgcaaccaccctgtttaaaatcaataagataaaaagttggcacgccatttgtattagctaagccacaggtgaatgcctgaaaccagaactatgaggattgaaattatgggtattttttctcgttttgccgacatcgtgaacgccaacatcaactccctgctggagaaagcggaggacccgcaaaagctggtgcgtctgatgatccaggagatggaagacacgctggttgaggtgcgttcgacatcggcccgcgcgctggcggaaaagaaacagctgtcccgtcgtattgagcaggcggtcgcccagcaggcggaatggcaggaaaaagccgagctggccctgcgcaaagagaaagaggatctggcccgggcggcgctgatcgaaaaacaaaagctgaccgaccttatcgctcagttggatcatgaagtgcagctggtggatgaaaccctggcgcggatgaaaaaagagattggcgagctggagaacaaactcagcgaaacccgcgcccgtcagcaggcgctggcgctgcgccatcaggcggcgagttcgtcccgcgatgtgcgtcgccagctggacagcggtaaactggatgaggcgatggcgcgctttgaatcctttgagcgtcgcatcgatcagatggaagcggaagcggagagccaccgctttggcaagcagcagacgctggatcagcagtttgccgaactgaaagcggacgatgaaatcagcgaggagctggcggcgttgaaagccaaaatgaatcagtccaaccagtaagtatgattgcgcggcgcggcgttgcgccgcggctcaccccctgtaaggagtacacatgagcatgctttttctcgccattccgctgacgctgtttgtgctgtttgttctgccggtctggctgtggctgcactacaacaatcgcggcgccaacggcagtctgacgcaaaatgagcagcaacggctgctgcagttgaccgatgacgcgaagcggatgcgcgaacgcattcaggcgctggaagcgatcctggacgccgaacatccgaactggagggacaaataatggccgggctggatctgaataaaaaactgtggcgtatcccgcagcgcgggatggtaaagggcgtctgcgcgggcattgctcagcatcttgatgtcccggtgaagctggtgcgcctgattaccgtgctggcgatgattttcggcctctttttctttgtcctggtggcctacatcattttgacttttgctctggatccgataccggacagcgagctgtacggtcataaagcgccgagcaatggcgatctgctggccgccgtggatgccgaactggcctccggtgaacagcgtctgcgtgaaatggagcggtatgtgacctccgacacctttacgctgcgcagccgctttcgccagctgtaaaccctgtttctaacgaatgaggcaacgcatgaatagcaaatggcaacgcgccgggcagcaggtgaaacccggtctgaaaatcgtcggtaagctggcgctgctgaccgcgctgcgttatggcccggcgggcgttgccggctgggcggttaaatcggtcgcgcgtcggccgctgaaaatgctgctggcggtggcgctggagccgctgctcagcaggctggccaaccgcgtcacgcgcgggatgaaataatgccgccgtggggaaggcgcaaaaggattaacgttgtcctgcttatccccggcagatagcttatgatgacgagacataccttcagggcataacggactggcgatgaagcgactgaaaactgaattgaatgcgctggtcaaccgcggggttgaccggcatttacgtctggcggtgaccggcctgagccggagcggtaaaacggcgtttatcaccgcgctggtcaaccagctgttgaatatccacaccggcgcccgcctgccgctgctgagcgccgcacgcgaagagcggctgctcggcgtcaagcgcgtgccgcagcgggactttggcattccccgattcacctacgacgaagggctggcccagctgtacggccagccccccatgtggccaaccccgacgcgcgggtaagcgagatccgtctcgcgctgcgctaccgttcgaatgactccctgctgcgccattttaaagatacctccacgctgtatctggagattgtcgactatccgggcgagtggctgctcgacctgccgatgctggcgcaggattatctgagctggtcgcgacagatgaccgggctcctgcagggacagcgtgcggagtggtcggcccgctggcggcagctgtgcgccgggctggatccgctggcccctgccgacgaggctcggctggcggatatcgctgccgcctggacggactatctccacgcctgtaagcgcgaagggctgcactttatccaacccgggcgctttgtcctgcccggagaaatggcgggcgcgccggcgctgcagtttttcccgtggcccgacgtcgacgccgtcggcgaagccaagctggcgcaggccgataaacacagcaacgccggcatgctgcgcgaacgttacaaatactattgcgaaagggtggtgaaggggttctacaaagagcacttcctgcgcttcgaccggcagattgtgctggtggactgtctgcagccgctcaacagcgggccgcaggcgtttaacgatatgcgtctggcattgacccagctgatgcaaagtttccattacgggcagcgcaccttgtttcgccggttgttctcgcccgtcatcgacaagctgctgtttgccgccaccaaagccgatcacgtcacgatcgatcagcacagcaatatggtgtcgctcctgcagcaactgattcaggacgcgtggcagaacgccgcctttgaagggatcagtatggattgtctggggctggcgtccattcaggcgacccagagcgggctgattgaggtgaatggcgagaaaattcccgccctgcgcggcaatcgcctgagcgacggccagccgttgaccatctatcccggtgaggtgccggcgcgcctgccgggtcaggccttctggcagcagcagggatttcagtttgaaaactttcgtccgcaggtcatggatgtcgatcggcctttgccgcacattcgtctcgacgcggcgctggaatttttgattggagataaactgcgatgagcgaaccgttaaaaccgcggattgattttgatgggccgctgcaagcggagaaaattccgccgctgaaaggcgctcgcgccttcgacaccctggaggcggacaacttcgcgccagcgcggctggtgaccggcgaagaggaagagggggcggcggaagcggtggtggagtcggtcctgcgacccaaacgcagcctgtggcggcggatggtcagcgccggactggcgatcttcggcgtcagcgtcgtggcgcaaggcgtgcaatggacggctaacgcctggcagacccaggactggattgcgctgggcggctgcgtcgccggggcgctgatcgtcggagccggcgtcggatctgtagccaccgagtggcgccgtctgtggcgactgcgccagcgcgcccacgaacgcgatgaagcgcgcgatatgctgcacagtcacgcggtcggtaaagcgaaagccttttgtgagaagctggcgcagcaggccgggctggatcagtcgcatccggcgctgcagcgctggtatgccgcgatccacgaaacgcaaagcgatcgcgaagtggtgagcctttatgcgcagctggtgcagccggtgctcgatgcccaggcgcggcgggaaatcagccgttcggcggcggagtcgacgctgatgattgccgtcagcccgctggcgctggtggatatggcgtttatcgcctggcggaacctgcggctgatcaaccgaattgccacgttgtacggcattgagctcgggtattacagccgtctgcgactgtttcgcctggtgttgctcaatatcgctttcgctggcgccagcgaactggtgcgcgaggtggggatggactggatgtcgcaggatctggcggcccggctgtcggcgcgcgccgcgcagggcattggcgccggtctgctgaccgcccgtctcgggatcaaggcgatggagctgtgccgcccgctgccgtggatcgccgatgataaaccgcgactcggcgattttcgtcgcgagctgattgggcagttgaaagagaccctgcagaaaagcaaaacccgcccggagaagtaacctccgctcagagacatcgccgggcggcggcttcgccttgcccggccttcgacgtcaagctctggcacgcgcaccctggcaatattcgattaggcgcattccgccgccagccactcgctgaaggcgcgaaagcgcgggcgggaacggttctcctgcggacaaatcaggtcatagccaaagggcgagggcgcttcattttcagacaaggccaccagcctgccggcgtcgagcagcggctggatcagcgttttacgccccatcaccacgccgagtccattaagcgccatctcgatggccagcgagtggttattcaccgcgtaataccggccgtcaaaaggtaacgcctgtccgctgtgctggcaccacaggcgccattccgcaaattgatcctgtacgtcggtggattcgcacgcatggatccagacgagcgccgccgggtcgccgccgctcagcggacgatactgctggcgataacgcggggagcagaccgggagcaaactttccgccatcagccgctgttgataaagatcgggatagcgcgtggcgccgtagtaaattgccagatccacccgctcctcgttaaaatccatcaccccggcgcgcacgcgaaactgcagattcagtcccggccattgcgtctgaaagcgcggcagacgcggcattagccacagatgggccagcgtcggcgcaataccaatatgcagcgtgccgcgcagatcctgatcgcgaatatcctcaatttcatcgttaatcgcccgcagcgaatggcttaacgtcgccagcagccgcttaccttcctctgtcagcgccagtttacgcgtcatgcggataaacaggcgaaacccgatgtgcatctccagcctgcggatccgatggctgaccgctccctgggttaggttcatttcatgcgcggcaagggtaaagctcaggtgatgggcggtcacctcaaaggtctgcagcagcgcaaggatgctttgttgctcaagcacagattgtctcccttatgcattaattgagttcatgcataggccgatttaattcgtttgttaggccagttttgccggttttaaatagttatatcgtaactaaaccgaggtataccatgtcaggactcaaaattgtggtgattggcggtggctccagctacaccccggaactgattgaaggtttgctcaaccgctatcacgaaatgccggtcgcttcgctatggctggtggacattgaagagggcaaagagaaagtcgagattatcgccggactggcgcggcgaatgatcgccaaagccgggctgactattgaagtggtggccacccttgaccgggaaagcgcgctgcgcgatgccgatttcgtctgctcgcagtttcgcgccggctgccttgacgcccggatcagcgatgaacgtatctccctcaagtatggcttgatcggccaggagaccaatggccttggcggcttcgccaacgcctgtcgcaccattcccatcgccctggagatcgctgccgatatggagcgactgtgtcccgacgcctggctgctgaactttaccaacccgtcggggatggtgaccgaagcgatcctgcgccacagccgcatcaaagccgtcggcctgtgtaacgtgccggtgattatgcaaaaagggataaccactctgctgcaatgcgctgacgaaaaagaggtggtgatgcaggtcgccggcctgaaccactttatcttcgtgcgccagatcctgcacaaaggtaaagaatggctgccggaggtgatagccgagatcaacgccggtcgggatccgctggtgccgcgcaacatttcgccgttccgttggccgtcgcatctgctgcagggcttaggcatgatcccctgcgcctatctgcgttattactacatgaaagacgatctgctgcgccaggagctggcggaggcgggcggcgaaggaacccgcggggaagtggttaagcagctggaaaaaatcttgtttgaccagtaccgcgacccgcacctggcggtcaaaccgaaggcgctggaagggcgcggcggccagtactattccgaggcggcctgcgagctgatgaatgccatctacaacgacaagcggattatcatgcacgtcaacacgcgtaataacggcgccatcaatggcctgccggatgactgcgcggtagaggtcagctcgctgattaccgcttctggtccgctacctctcaatgtggcgccgttcccggaagataccctgcgtttgctgcagctgatgaaatcatttgaacggctgactatcgaggccgcgctcaccggcaaccgccataccgcatggcgtgctctgatgctgaatccgctgatcgtcagcggcgagaagctcgaactggcgttggatgaggtgatcgctgagaaccgtcagtggctgcctgctttccacgcctgacccaagactcaccggccgcctggccggtgatttaaccactgaccgtctgactttacgccacagcgcccatttttccgccacactgtcaataattgttgacagttagcttcccgaaaacccattcctggcctattattctcccgtcattggcacttttagggtgaacactcccatgcgtcttgaagtcttttgtgaagaccgtctcggtctgactcgtgaattgctcgatttgctggtgctgcgtggtattgacctgcgcggtatcgatattgaccctattggccgaatttacctcaatttcgccgaactggaattcgccacgttcagcagcctgatggctgagatccgccgtatcgccggcgtgacggacgtgcgcaccgtgccgtggatgccgtctgaacgtgaacacctggcgctcagcgcgctgctggtagcgatgccggagccggtgctgtcgctggataccaaaggtcgggtggaactggcgaaccccgccagctgcctgctgtttggccaaagccaggcgaagctgcgtaaccacccggtggcccagctgatcgccgattttaacgttcagcgctggctggagagcagcccgcaggagacgcatgcggagcatgtggtggtgaatgggcagaactacctgctggaagtgactccggtctatctggaaggcgagcataacgagcgagtgctgaccggcgccgtggcaatgttgcgctcaaccgtgcgcatgggacgccagctgcagaccatgaccagccaggataccagcgccttcagtcagatcctcgcggtggggccgaaaatgcgccacgtggtggagcaagcgcgcaagctggcgatgctcagcgcgccgctgctgattgtcggcgacaccggcaccggtaaagatctgctggcccatgcctgccatctggccagtccgcgggcgggcaaaccctatctggcgctcaactgtggctccattcccgaggacgcggtcgagagcgagctgtttggcgacgcgctgcagggcaagaagggcttctttgagcaggccaacggcggctcggtgctgctggatgaaattggcgagatgtcgccgcgcatgcagaccaagctgctgcgctttctcaacgacggcaccttccgccgcgttggcgaggatcatgaagtgcacgtcgatgtgcgggtgatctgcgcgacgcagaaaaacctgatcgagctggtgcagaaagggcttttccgcgaagatctctactatcgcctcaacgtcctgacgctgtatctgccgccgctgcgcgattgcccgcaggacatcatgccgctgacggagctgttcgtggcccgctttgccgacgagcaggggatcccgcggccgaagctctctgccgatctcagtacggtgcttacccgctacagctggcccggcaacgtccgccagctgaagaatgccgtctatcgcgcactgacccagctggaaggatttgagctgcgtccacaggacattctgctgccggaccatgacgtcgcctcgctgccggtgggcgaggaggccatggaagggtcgctggacgacatcacccgccgctttgagcgctcggtgctgacccagctctatcgcagctaccccagcacacgtaagctggcgaagcggctgggggtgtcgcataccgccatcgccaataaactgcgtgaatatggtctgagtcagaaaaagggcgacgaataatcccgccaggccggcgacccacgtcgccggcatcccggcctgcaaagcgggccaaacctgtatatactggttttttaatcctttttccggggtggtgcatcttggcgtcgcgtcgcgcgatcgggcactggctgatattgctgctgctctctgttctcttttcctcgctgctgttacgaatacacctgccggcagcgctgctgctggggccgctgatcgccggtctcattttgagcctgcgcggggtgaagttgagcatccctcgcccctgttatctggcggcgcaggccatcgtcggctgcatgatcgcccgggcgattaatccctctgtttttggcgtgctgttcaacaactgggcgctggtgctggcgatcctgttgaccaccctggcgataagcggccttaccggctggctgctggtccgctacagcgcgctgccgggcgccactggcgcctggggaagctctcccggcggcgcgtcggcaatggtggtgatggcccaggagtacggggccgatgtgcggctggtggcgctgatgcagtatctgcgggtgctgtttgtcgtcggcgcggcggcgctggtggtgcgctatgccctgggcaatgaagcacaggagatgactcaggatattgtctggtttccatcgttgaccctgaatttccctttcacgctgctgctgacggcggtggcctgttggctgggcatgcggctgcgcatcccctccggggccatgctgctgccgatgctgcttggcgccctggcccagggcggcggctggctgatgctggagctgccggagtggctgctggcgatggcctatgcggtgctgggctggacggtggggctccagtttaataaagccatttttctgctggccctcaagacgctgccgcagattatcgcctccatcatcggactgatcctgatgtgcgccctgatggcccttgccctgacccacattctgcagatggactttatgaccgcctatctggccaccagccccggcgggctggacacggtggcgattatcgccgccggcacccgggcggacatgtcgtttattatggcgctacagacgctgcggctgtttaccattttgctgaccggcccggcgatggcgcgggctatctcccgctatgcgccgcggcaataaaaagccctcgcagagcgagggctgggcagatcgaatgtccgcgagcgcgatgcgcccgggcaatctgttatcaggctttcagggcggccagcgcggcgtcgtagtccggctcttcggtgatttcgttcaccagctggctgtagacgacctgatcgttttcatcgattacgaccaccgcacgggcagccaggccagccagcggaccggtggcgatggcgacgccgtagtcagcgaggaaggacgcgccgcgcagcgtggacagggtgaccacgttgctcaggccttccgcgccgcagaagcgggactgggcgaacggcaggtcagcggaaatgcacagcactacggtgttgtccagttcagcggccagctggttgaatttacgcactgatgcggcacacacgccggtatcaatgctcgggaaaatattcagtactttacgtttgccggcgtactggctcagcgcgacgtcagagagatctttggcgaccagcgtaaacggctgcgctttagcgcctgcctgcggaatggtgccctgaacagaaacggggttgccctggaaatgcacggtttgtgacatggttatcttcctgtttacatatagttaacgtcgcgagtagtgtatgacatccgccagctacacggcaaaccctatttaacatttaccagagaggacaagggaatgcgtaacgtgcgagtgtatgaggaagcctggccgcttcataccccttttgtgatcgcccgcggtagccgcagcgaggcgaaagtggtggtagtggaactggaagaggacggcgtgaaaggggtaggcgaatgcacaccctatccccgctatggcgagagcatcgcctcggtcatggcccaggtgatggcgatcggcgagcaactggaggcggggcttacccgcgaacagctgcagcggctgctgccggcaggcgccgcgcgcaatgccattgactgcgcgctatgggatctacaggcccggcgcgaaggcaaaaccttggcccagctgttgggcgtggcgttgcctgaccgggtgattaccgcccagacggtggtcattggcacgccggatcagatggcggccagcgccgcggcgctgtggcaggcaggggcccagctgttgaaggtgaagctcgacgatcgactgatcagtgagcggctaatcgctatccgccaggcggcgccggaggctacgctgattgttgacgccaatgagtcctggcacagcgaggggctggcggcgcgctgtcagctgctggcggacctcggtgtggcgatgcttgagcagccgctccccgccgacgacgactcggcgctggaaaacttcgttcatccgctgccgatttgcgccgacgagagctgccacacccgggagagcctgccgcggctgcgcgggcgctatgagatggtcaatatcaaactggataaaacgggcggcctgaccgaagcgctggctctggccggggaggcggaacggcagggatttgaacggatgctgggctgtatgctctgcacctcgcgcgggatcgccgccgcgctccctctggcgccgctggcgcgcttcgctgacctcgacggcccgacatggctggcggtggacgttgagccggcgctgcggttcagcaccggcgtgcttcatctttaagcctgccagtgcagcagatcggtcatcgccggcaggtaacgctccgttgcctcgtctgcggagaccggcggaaactcggcggtgatgcaggggagtccgatatcggcgcaccagctgccaaaggagcccggcgtgtcgtagcccacgctgcccaccagcggcagggagaaggcgtcggccagccagcgacccagcgggctgtggcccggatcttcgatgcaggccagcggatcgtgaaaggagaccacccacgccggatgaatctgatggatcaactgacacagggcctcggtctcccgttccgaacccggctgctcgccggtcaacagcaccacgtcgcgctccgccgccgcgctattccagcggtaaaccgtttccccttgcttccagttggctgctggaaagttacggttgaggtcaacgccgcgggcattggcgcgcagcccgagctgacagccgtcaggattgaccgtcagcaccacgtggtggcggcgcagctcgggtttcagggtgcgcagggcgcaggagagggtcacaatcgacgaattctcatcaccgtgggtaccggcaataatcagcccgctacggctgtcggcctgcggcgcaggaaaccacagcagcggcgcgcccagttccgagctgccatactgccgggttcccggcggaaagtcgccgcgctgcgggcgaggacgtgaaatagacatagggcttcctgtgtgtcgttattatttagtgttggcgaaaagcgtatcgggatcaaacccattccctgaggcgtgaaatccgacggcacatcaattttctatcatatgtcgtttgcaatttcaggtgatgaaacaaataattatcgctctgttggcggtatttttttcattttaaaggggatcttatgaagtatcctgtcgctttgacatgcggcgcgctgtggttagccagcgtatcttctctggcctgggcggctgacgtaccgccgggcacggtactggcggaaaaacagctgttagtgcgccatatcaaagatgaacccgcctcgttagatcccgccaaagcggtgggcctgccggaaatccaggtgatccgcgatctgtttgaaggtttagtcaatcaggatgcgaaaggcaacctggttccaggcgtagcgacccgctggcagagcaacgataaccgcgtctggacctttaccctgcgtgataacgcccgctggtccgacggcacgccggttactgccgaagatttcgtctatagctggcagcgtctggtggatccgaaaaccacttcgccgttcgcctggttcgcggcgctggcggggatcgctaacgcgcagaacattattgacggcaaagccgcgccggagaccctgggagtcaccgccgtcgacgcccacaccctgcgggtgcagctggataaaccactgccgtggttcagcaacctgaccgccagctttgccttctatccggtgcaaaaggcgaatgtcgacagcggggcgaactggacgcggcccggcagcctggtgggcaacggcgcctatgttctgaaagaccgtgtggtcaatgagaagctggtggtggtgccgaacacgcactactgggataacgccaaaacggtgatccagcaggttacctttgtgccgattaaccaggagtccgccgccaccaagcgctatcttgcaggggatatcgatatcaccgagtctttcccgaaaaatatgtaccagaaactgctgaaggatattccggggcaggtgtataccccgccgcagctgggtacctactattacgctttcaatacccaaaaggggccgacggcggatgagcgggtacgcctggcgctgagcatgaccatcgatcgccgggtgatggcggagaaagtactggggaccggggaaaaaccggcctggcgcttctcgccggacgtgacggcgggcttcaccccccagccgtcacagtttgagagcatgagtcaggctgagcttaatgcccaggcgaaagccctgctggctgccgcgggctatggcccgaatcgtccgctgaagctgacgctgctgtataacacctctgagaaccaccagaagattgccatcgcggtggcgtcgatgtggaagaaaaacctcggcgtggaagtgaagctgcagaaccaggagtggaaaacctatatcgacagccgtaacaccggcaatttcgacgtgatccgcgcctcgtgggtgggggactacaacgagccgtccaccttcctgtcgctgctgacctccacccacagcggaaatatctcgcgctttaacgatccggcgtacgacaaaatcctcgcccaggcggcggtagagaattcggccaaagcgcgtaacgacgattacaacgcggcggaaaagatcattatggtcaaagcgccgatcgcgccgatctaccagtacactaacggccgattgattaagccgtggctgaaaggctacccgatcaccaacccggaagatgtggcctacagccgtaccatgtatatcgtgaagcactaatcggtcgtggttgcctgaagatgtcaggcaaccatcgctgatccccgagctggcgcgtcttgccgcgccagtttttcctgctctccttctcgcgccacagtagaaagtctcacttttctggcagtatggccgactgatgccaggttctaccatctggtcgcgaagcatcagaagatctcatccgccgggtttttatcatgatgctcaacgtattcggcaatcatgccatccggatgccgaaccagcatgttccagccggtgggcacggccttcaccgggttgataatcgttgccccggtggaaggcagatgtttctcccaggcggtaatgtcgtttaccaggaaagtggcctcggtggcgcgaaacggagccaggctttgctcggttccgccaattaaaagcacggaacccacctgcgccagtttgagatcgtattcgggatagtcaaaacgtaaccttgccttttgcgaaatgagatgttcataaaacgaaacggtttcttcaaagcgggcaatcagcacgcatcgacggatcaggatattgaggactttcattatatctccttcgccattttctcagagatagcgtagcagcactgaggtggaatgtaaggctcaagtagcagaagagcgtgacgtatagttgtggcctgcgtataagaagatatcggcaatgaccttgtgcgctggataagaaaagttgcagttaaaaaatatttattttgtaatgatgctgtggtgtgattgctgagcatacgattagcgggatgattaagaggggctagatggaaagtttaatttcttcgatatggaattttgatgggctgataaatagcgcgttaatttttgttacttttggtttattaggagtgtttatctggaaacgggcaggatccgcatattctttattgaaccggctatgggagttctgcctgggagggaaaacgtttcacgacggtaaaataaatgcatatttcaatgagagaaatgatgttgaacgctttaatgttttatttaatgttggcgcaaagaataaagaagagattaaatcactgattaactggacgaaaaagaaaaatatagatattcgtcatgtcacagccgcgaaaggatggtttgaaatatcaacgcttaaggcaataaaaccattatttatcgctaatgttggtgtatttgtctcttgtgtgttaactatgctgctattatcaaattttatgttgctggcattgaagccatccgcactagtacgattaggcgacgacaagtcatgggtttggattaatgatcatattgctgagagttcgatctggaccaataattaccttcccctgaactggactgagtggaagctcgataaaaaacagtgtgaaagtgaagatttcgataaaacggttttctcagaaaaagcggggataagtgtgcgctcggttgacaggatttgtgagaacttttcaagtggttcgttgagtgatactataaataatattattaaaaatcaaaaactggcatgggttttggctatttaccccttcatctttacgattatttgcttttttagcttgttacgcagaggtgctgcttctaaactttataatgaagtacataactcacaaaattaatatttatataaattcatttccgtctggcattactgtttgcatcgatcggaattaaatgacaggtccgagtacagaagctgtcaccggccactaccggttgcctgctgcctgcaggcaacctcagctacattcgcaatgtatcaatgaccgctctcagcgcgggcgacacattgcggtgcgggtaatagagaaatgaaccttccagacgctggctataacgctggagcacccggataagtgtgccctgggctagatcgtcggtaatcagctcttccgggacataggccagccccagaccgagcctcgccgctttggcctccatatagctatcggcgaaagcccactgtccctgaggtgggtgggtgatttttttgccatccacattaagttcccaggcgtaaaggctgccgtcgccgaactgataagcgatgcaggggtggacgactaaatcggcgggcgtttgtggaaagccgtagcgtcgaaaatgttccggggtacccaccaccgccatctccatatcgggcgaaatgcgtaccgcaatcatgccgcttccgacttccgggcccagacgtacgcccgtatcaaatcgctgcgcaataatatcgacaaaccggctttcgctgatcagttccagtctgatatcgggatagcgttgtttaaatactgccagcttcggcagcaggactttatcaatggcatgctggctggcattgatgcgtaccgtaccggagggcgtctgacgatagtgggccagcgtggcgagccccatatctaaggcgtcgaaaccggattcgacgttgtgatagagctgctcacctgcctgagtgagcgacaaccggcgggtggtacgcaccagaagctgaacgcccaggcgttcttcaagttcacgaaccgcacggcttaccccggactgcgccaggccaagtcgttgcgctgcggcggtaaaactgccttcccgtaccacctgcataaacagataaaggtcattatagttttcccgtttcgccattctcccgcctcgtcacccagatgccatttagaacaatatggtattaattttagcatttttcagcctctaatcagaaccattactgctggctacactaagcgcacgacaacaaagcacagcagcgttgtctactgaagacttgcattgatcacgtttatttaggggaattttgatgacggttttcaccaaaaaactgacagccgcgatacccgccatgctgctttgcgcctcattaactggagtcacaacgatgagctctgctgagacaactaacccgaatgcgcctgtttcactgattgaacaatgggataaaacgtttgctgagagcttgaaagtggatcaccgtaaggtgaccttccagaaccgctacgggataaccttagttggcgatctctacctgccgaaggatcgcggtgaacgcaaactggcagctattgccgtgagcggtcccttcggcgcggtaaaagagcagtccagcggcctgtatgcccagacgctggccgaacaggggtttgtcaccctggcgtttgacccatcctatacgggcgaaagcggtggctacccacgcaacgtagcctcaccggatatcaataccgaggatttcagtgccgcggtggactttctgggcctgcaaaaagaggtggatcgcaaccgtatcggtttgctcggcatttgcggctggggcggtatggccctgaacgacgcggcgatggacacccgcgtcaaagcggtggcgaccagcgtcatgtatgacatgagccgcgcgatggggcatggggtaggcgatggcaaagaccgctacacgacagccgaccgccgagcggtactgcagtacttgaacgcgcagcgctggaaggatgcggcaaacggcacttccgccccggtgggcatgacatatatgttgatgataaaggcaacgtcagcgctgccgatcgtattttgccggaaagcttgcccgccaaccccaatccggtcctgaaagagttcttcgattattaccgtatgcgacgaggtttccatgcgcgttcggttaattcaaccggggcatggaatgcgacgatgccgctgtcgtttatgaatatgccgctgctgagttacgccagtgaagtgactattccgacgcttatcgtgaccggcgaaaaagcccattcacgctattttgccgaagatgcctttaaggccatcggcagtaaagagaaagcgctggtgattgtcccaggcgcaaaccacgtcgatctctatgacaacgtcgcgggcaaaattccctttgcgacgttcgcgcaattttttaaaaccaacctgaaatagatctcctgtgccggagacatccccaaagccgccacgcgcctgcgggcggctttgtcttgtcggagagaaataatgtctgcattaggtcacacccgggcacactggagcggcgtcctggcgatgacgctctgcgtatttgtgctcattgcctcagaatttatgccggtcagtctgttgacacccatcgcgggtgatttacacattaccgagggattagccggtcagggcattgcgctttctggcgcgctggcggtactgaccagcctgacgatatcccgtcttaccggatcgctggaccgtaaatggctgctgctggggctcacggcgttgatggcagcctctggggtgattattgccctggcgtccagtttcccggtttatatgctgggcagagcgctcattgggatcgtcatcggcggcttctggtcgatgtcggcggcaacggccattcggttggtgccgcaacgccaggtcccccgcgcactggccatctttaacggcggcaacgcgctggccaccgttgtggcagcgccgctgggcagctacctgggggccaccgtcggctggcgcggcgcctttttatgtcttgtcccgctggcggtgctggccttcgtctggcaatgcattagcctgccgtcgatgaaaagtccgcgcgcaccacagcggcagggatcggtgctgcgtctgttccgtctttctacgctatccctgggattgctggcctgcggactgttctttatgggacagtttaccttatttacctatgtgcgaccgtttctggagacggtgacccaggtcagtccttctggtctgtccctgatattgctgacaatgggtatcgccggttttatcggcacgctgcttattacgaccgttctgaatgcccgattttatccgacgctggtggctatcccgttgttaatggccgcaattgccggaacgcttctgctggccggacaccacacgggatcggtcgccgtactgttaagcctgtggggcctgctggcgacggcggcgcccaccggctggtggacatggattgcgcggacgctgcccgaggatgcggagacgggcggcgggctgatggtcgccgtgatccagctatcgatagccctcgggtcaacggtaggcggcctggtgtttgatagtctgggatggcacagcacttttgcactgagcggtctgttactgctgggcgcggcaggggtgacttttctgctctctgtcaaaatcagatcatctcagcgcactgcgattaatgaattgaatgcataagtcaaatcaggaatgacaggctaatcgtgaccgcgttcctgtcttaccatggtgttttaacaagaggggagcttcaccgtggaatattcagtattaagtaacgctcgcaaaatgccgatgctgggtttcggcgttttcaaggtgaccgataaagcggagtgtaagcaggcggtgttgaacgccattcgcaccggttatcgcctcatcgataccgctgccgtctacgataatgaagatgcggtgggtgaggccgtgcgcgaagccatcgccgaaggtctgtgtacccgcgaggcgctgtttattacctccaaactgtgggtccaggacatggccaacaccgggatggcgaaagccgggattgccgcgtcattaaaaaaatcgggcctggaatactttgatctttatttgctacatcaggcgatgggcgattatttcagcgcctggcgtgcgctggaagaggcctatgaggccggtaccctgaaagcgatcggcgtctccaatttttacccccatgtgttagctaacttctgcgaaactgtcagaattaaaccaatggtgaaccaggttgaactgcatccttatttcgcgcagcccgcggcgctggaagccatgaagcattatcacgttcagcctgaagcgtgggcgccgttaggcggtggcagacataatccgtatcaagatgcattgcttcgggggatcgccgatgcgcaccagaaaaccattgcgcaggttgttctgcgctggaacgtgcagcgtggcgtcacggtgatccctaaatccacccgccaggagcgcattgaagaaaattttgctatctgggatttcgtattaacagataacgaaatggcgcaaatcagcgccctggatttaggctatgttggcgaagcggtaaaacacttcaaccctgagttcgttcgcggatgtctgggggtgaaaatccacgactgaccgcggcaccgattggctccatcttcatctccccgcctgcgccgcagcgacgggctcggtatgctggttagcacccacgtgtttgccgcgacggttgtcaatgcggtagacgatcgtcacgggctgcgggccggcgggggtgacggtcaactccctgaccatttggccagcgtcgggcggcagggtcagcgaggtttctccctgagcgagcatctggccattttgcctgacctgccaggtcaggcggcaatcctcgcaggctgcccaggtatcgttaatcgcccacaggcgcaccgtcgccgggcttccctgacgccagctggcggtcaccggctcgatggacggcaggatcggctgataggcgcgctgcagggcatagtaaccggccttcggctggcgcagataatccaccaccccccagttgatggagggccatgtctcaacaaacataaagtggaacagggcggtcaccggctgataacgctgacggcgatagctctccgccgccagcgccaccagccgggcctgatatgcttgggtgttttcaatcatctcctgaatattgttgcctcgtggaataccggcaaatttaaaggtctggaaaggctgaaaattatggtacttccatcgcacccagccggggtcgtcggcagcggtggttttcggccacagcagacgggccgggataatggtcttcagggtggagagccggggcagcgcctgggcgccaaactcggtaataatcccggttttcgccggggcgagcaggtcgcgcagggtgccgaaataccagcctgcccagtagtgctcttcgacagcggaaaagcgatgcacgatgcgggaggtgtcttccgccagcgcatcgcccacccgctgcgtcagggtctggtttaaggttttacgccagtcggggaagcgtttctccatccacggcgagttccacggcggctcgttgtgaccgccccagacaataatcgccggtgaattgccgaactggtccatcatcgcccgggtctggcgcacggcgttatcggcgaaggcggcgctgtcatcataaccccactgcagcgggacatcctgccaaatcatgagtcccatctcatcggccacctcatacagcgcgcggcccgccacgtggccgtgtacacggatggcgttggcgttcatcgccgtgacaagcctgaaatcccgacggtactttttccgcgtcatggtgcttagccatggggagccaatatagttgctgcccttaatgaacagccgtctgtcgttgatgcgccagccctgattatccgccagcgcttccaccttacgtaatccggtgcgggtgacggcggtatccatgatcccccgcttatccacgagggtggcgcgcacgcggtacaggttcggtttacctgtgcccaccggccaccagagctttgccgagggcatgggcagcgagacgcgcagagtgcctgcggtattctccagggtgaccgcaaaggcctgctgaaaaggcgggccggaaaaattgtccggggtggccgtcaggcgcagcgtgacggggccgggcgtcacggcccgatagcggatttcggcacgcagcatgggcttctccagcccctgttgccagtccgggcgcaggatcacctcgtcgatagtgacgccgcggctcagatggagcttcaccggcgcccagatccccccggagttggcatcctgcccctgaaccgaccaggcgccgcccggacgggtatcgtgctgattgaggatccctttcatcagcgtcttgtgcagcggccagatcttttgcgggtcttcataggggctgtcgacccgcacggcgagctgattatggcggcgaacggccccggtgatgtccaccgggaagcgctgaaaatagccttcgtgccgggtcagcgtcttgccgttgagcgccacctcggcaaagtaatcgacgccgtcaaacaccagcgtagccatggcgtccggcgtcaggccatgcagggtaaattgatggcgataccacagggcgccctgatgatcgtatccggcgctgtaccagtttgccggtacccgcagcgtgcgccagtcgccgtccgaagcctgcgcgccggcgaaggcgctgtcgttggcgtcatgcacccgccattgtccggccagtgaccaggtcaccggcgcagaaccggcgtgcgccagcggcaggcaaatgaccagcagcagaagacgtctagcgatcatggggaacctcctgcgttctgcggcgcagccacaggtggcagcccgcgatcgcctcggtcagcgcgtcgcgcaggtcgcccggcacgctttggtctggcgaggccgcctggctctccagccgctggagcacactggcaaggcgttgaaaaccaagggtggcggcctcgccgcgcagtttgtgggcggcgcggcgccatgtctcccggtcattggcgtcaatggcgtggttgagggcggcggccgcagcattaagtcctgcagcgaagagtcccagcaactcctcgacaagctcaggatcgtcggcgcactgtttcagcaggcgggcttcgtccggcaggccttcctcttcctccggcgcgctatcttccgccgcgccgacgcgggcgatggcttcccgtagcgcctcctggctcaccggcttagcgatatagccgtcaaaacccatcgccagacagcgttctctatcgccctgcatagcgtgggcggtcatggcaatcgcgggctgatgttgcctgcccagcgcgtgggtctcttcccgcagcaggcggatggcggtttcaccgtccatctccggcatttgcagatcgatcagcagaagatcccagcaggctgcgcgccagcgctccagcgcttcccgaccattgttcactacctcgcagcgatgacccaactgctccagcagtcgtctggcgaccttctggtttaccaggttgtcctcggcgagcaggatatttagcccggtctggtccctgaccggttgcgcaacgggggcaggcgttgtcgtcgccaccggcgtgggcaccagaatgccggcgataacctgatgcagttcgcgctgtgccaccggtttatgcagatagtgggcaatgccgatgcgcttaagcatattggcgtcaaaatggcggctcatggagctgagcataacaatctggttttgcctggcttcaggcaaagcggagagctccagcgccagggatacgccgtccatatccggcatctgcgcgtccagcaggatcagcggccatggcgggccttcggcggcccggcgtagcgcctcgccagcgttgttcacgcaggttggcatcagtcccatctggcgaagcatggcgtcaagcaggcgcaggttggtgctgttgtcgtcaaccaccagcacccgctggtggttgaagcgtcccggcggggcgctaccggagacggcggcgtgcaggccttccagcggcagggtgaaggcaaattcgctgcctgccccaggctggctctccaccgtcagctcaccgcccatcaggctgaccaggcgggccgaaatggttaaccccagtccggtgccgccgtagcgacgggtggtggagctatcggcctggctgaaggcctcgaagatcgccttttgcttctccggggcaatgccgatgccggtatcgcgaatgcgaaagcgccagcggttgtcgtcctcggccggcgctatcgccagcaggacctccccctgatgagtgaacttcagggcattacccagcaggttggtcaggatttgccgcagccgggggccatcgacgatcagcacctcaggcaccgcaggggagatatccaccagcagctcaatgcccttttcgctggcggcaggcatatgcgggcggatcagcgactgaacaaaagggcggatctccagcggctctacgtccacctgcatcttgcccgactcaatgcgtgaaaaatcaagaatgtcattgataatgtgcagcagcgactgggctgagctcatcaccagcgaaaggtactctcgctgctccgcggtcagcggcgtgtcgaggcagagctgcgtcatgccgagaatgccgttcatcggggtgcggatttcgtggctcatattggcgaggaaggcgcttttcgcttcgttcgcctcgcgggcctccttcgccgcctcaatggccagcagctctgcggctttacgccgggtaatatcctgcaaggtgccgatcacccgctctgcctgctgctgcatgttaagggtgacgatctgccccgagagcagcatccagcgccagccctgcgtcgggtgctggacgcgaagctcacattcaaaaaccggcatgtgctcgttttgcgaggcgatcatcgcctgctgcagagtggcgcgatcgtcctcgtggaccaggttgagcataaagcgcagcggaaagcgccactgcgcccgcgactggccgaccatcgccagcagggtgtcattcacctgcaggctgtcgtgggagacctgccagtcccagataccgatctggatcgactccgcggtgaataaaaagtcatcatgcagttgatgacgcgaacgccgggcctcgtcaagctcggtgatgtcggtatgcaggctgacaatcccgccatccgccagccgctgatgctgaacgtaaatccggcggttgcccgactggcggacctcgcagtggttcgtctggcggcagttgcggataatcgcctcgcgcagcgtctgttgccggcctgggtcgatgttgtatccggcatcgataaacttctccgccaggctctcaagagaggcgccgacggcgagccagggcgcgatcgttggataaaacagcgccaccttatcattccaggcctgcagtcgttcgcgctcatcgtagatcatcaccgccgagggcaggaggttaaggtcgttacggttagcggcatgcatgattactggccaacagtttgatagtggagctccgcttggcggcgcagatactcgagcccaggggcgatggccattgcccatgcggtgaggatctcctcatcgcacagcggatcgcaggcgcggacggttttgagcatcgcttcccgccagagggcaaaaaaccgcggcggtagacgcaggccttcctcgctctgcgctcgcgccaaccgttccagaaaatcgggtacaaagaggtcgccgttgaccgccagcatggcgaaaaagctcttaaagatcatctgctggccttcctcgccggagcgttgggagaagtgctgctcggtttccggtgacatatggataaaggtgctgtagaaggcctggaagaagcgctgtttgtcgtgctctggtacgacgcgattcaggctggcttcaaagagatcgcgataaaacttcatggtgcgctccttatgacccgttcgcccggcaggcagcgtcggggcgggttaaattcgtccgtcgcgcggtgggcaaagtagctgttgtcatccgcgaggccgtttttgaacaacggcccggcgttgtgtttgtaaaacagcgcctccagcaccatggcgttggtggagagggtgagggtggcgttgacgtcgccggtggcctcgacccgtccttcaaaccagccgcgctgcgggtcgttaagatgggtagtgaccgccatcagcgcatcggtatactcggtttcccaaagcgtccacaggacaaagaccgctttggtggtcacctgcgccagccgggggtagtacttcccgtcgtccccgagcgtattccaggcgtagccattcccccagacggtgtcttccacgtgccagggcgcctgggtaagcgaaaaatcggcccgggcggtaagcaccttatcctgcgtccagcgcgttttctggctgagccatatcccttccgcccgctcgcgcatggctttttgcgccatctccggcacgccgggcggctgccagccgaactccagtccaggcagcatggcgggcagagtagagagcactacgggttgccaggtggttcgcgggtcgcggtcgtcaacggcgaggcggcgctgataaataatcacatggcgcgccgggggggagagggccttgccggccggaaatccccacaggcgaaacgcgctggcggcgtattcactgtctcccagccggagctcctcgcggatcgtccgctgaccgttctgcagtgaggcggaccacagctccccgtctttatcgataaccggacagaagttccagcgcaggacaattttatcaatgtattcaccatactgcggcgcgcgttcggcggtgagccgcagggcgagcatcagtcgggccatatcttttgctgaccagccgctggccgccggtttgccgctgaagtcgacaggggtcgccgtctgagtggagtatagcctgcccggcgaaccgccgtcggtcagcgtcaggcgattgagggtgccgagcaggggcgtcaggcgggcgtcgaattccgcttcctttaccaaccccagctctctggcggcgagcagggcgataagggtgtcgcccatctgccatagcgttgcgcggggctgtttgtcgctgccgttgaccaggccggtttgcggctgggtattgttctcgacgtaccgccaggcgatctgcgcccacgagcgctcctgcggcgtcaggctgctgatgcgggcagtggtgtgccagccgcctttggtcagccagcgccaccccgcgccttcgcgataaaacagcgccagggcgataagaaaaaggacgacggcgatggccagccagcgggctatggttttaagcattgcgcggtcaccggcggaagtttaacgggctcgtcagccttgcaggcggcacactggcaggcctggcaggcgggtttggtgcgctgcgtggtcccggtctgctcgcaccatgttttgacggcgggggtgttgctcaggaacgggcgattgcgcgggccgttattgggttcaaagagatccaccagcttcttgtcccacagcgacggggcgaaatcgcggtttttcgggttgtcgctggaaaactgcagcagttttccctcctttttaaatagcagtgcttccagcatgatgccgttgttgttggcggtaaactcattgattggcccgtcgccgttctcatacaacccctcgtaatagccttttcccgcttcgttcgcgttttcaatggcgtccagcagacgatcggtatagggcgagttccacagcacccacatccccatcgccgctttgagcgacacggcggcgctattcggtacgaactggcctttgtcggttatggtgttccagttaaacccgtcgctgaacacggtgtcatagacaaagtacggggatttatcgagctgatgctcggagcgggcggtgaggatcccggtgatggcgtagcgattctcctgggcctggtagacccggtcagcgaagtttttcatccagggatgggagtactcgcgcgggctgttgttccggtcaccagggttatcaaagccaaactccatgccatacagcacgtaggattcactgaccacatagttatgctggctggtttgccgtgggtcgcgcgaatcataggggaccagcacgcagtaaatctccgccagctcgtagggctgcggccggctggcctgacaggtgttaaatccccacagctgaaagcccgccgcgccgtactcctcgtatcccagacggccttcctgaacgtatttgggctggccgttttccagatacgccccgtacagcgtgccgcagggatcgacaacatggctgaagtcccaccccagcaccacgttatcgatgctgttgctgtattccggatagcgctccttgatcaccttcagccagatcagcattctgccgatatccagcgccgaaaagccgatttcacccggcttgttctggtagttaaccttttgtccgcttatcgtgttataggctttgttgggtagttcgttacggaataaatcgagcttattcaacgtggcgagaaacttcagcatccgacggtcgaactccgccttatcaataatccccaactcacgggctgcggtcatcgcggccagataggaggcgctgtcccacatggtggtggaggggtatttgtttaccgcattcaccagcccggtggtgggctgaaagttggcgacgaagtattgccaggcgtttctggcgatagtcatctctctcggcgtcagctccccgctgcgcggggcgtattccgcagccggcagaccggtcgcggcctgcgcgccggagagcgagagccacagcgccatgagtccggccagcaggggaaaacgggaaaaataggtcagcttcatggcgttgctcctgctgaggacgagggtagaggggcagggctcaggcaggccagacacagcatctgcccccgggaaatgtaggccaggctttccagcacgatcgcgttggtatcgccgtcaataacgtcgttgacgctgcggttgagatttaaccctcgctgccagcccttgcccgggacctgcagcgtctgcacctgctggcgcagcgcctcgctccagctattacggaacagagcgtaccaggcaaaggcggtgcgggtggaggtgatcgccgtttgctccggggcggcgctgcgtggggcgaaggcgctctgcggctgccggtccgccagcgcgctggcataatccggcgcgggctcggcgtagtcagtgctgatcggcggcttgctgaccctcaggctatgacggcgctgctggatttgcatgatgcgccaggcgatctccgcactctgcgcgtcaaagcccagctcaaggccggtgagcaggtacggcaggctgatcagtgaaggctgccgcccccagggcgtgcgcagcccctcgtcgggcaccatgatgccgtcgatatcgatcatctgctgcccctgcggcgggttggtcaccgccagccccgccgcgctgtcgatcaaccgcagcgtatggctggcgtacagccggtagccaaagctgtcccgcggttcatccgccgccagcgcccagtggtgcagcggcgccgcggcctggctggcggggctgttgctgatgagcgcgccgacccgccactgattaaacagatcccgcaccgcggcggcgtgctgaggatagcgccagagcagggtttgcagggcggtgagcaggcgtcccataccgatggcggaggagtccgggttgccgaggatctgcagcgtgtcggcatggtactgagcggcgggcaatccctgggcgttgaggggcagttgaccgagggtaaacagggcggcggcaatgcgctcatcaccttcggcggcggtcacaatatgcagctgctctgcggcgaccacggcgaaaagatagctgccgacgctccacaggctgagccagggttcgccatcgtgcgcgttggccaggccgtttggctgggtattgttgacataatactgccaggccacccgcgcccagatcgcctcgtcaaaggtcagctcgcgcgggggagggagcggcggaaaatcctggctcaacgtcatcccgccgctgctctcgacgcgcgcgggcatttgtttttccacccacacgacaatcgcaaaacccagcaggaagccaatgaggatagtgagatagctgcgcgcggatagcagggcgtcgcggatcctcatcggctcgcctcctgctcttcgggggcgtccacatggcggcgaagatcagtggcagcatggcggcaatattcaccgcgccccagaaaatgttgatgacgtacccggaggggtcgtcaacctgaccgcgcgccacctgaataccgccccatatcagccccgtcagggtgagcaaaacgatggcaatttgcggcttgacgagatagagaaaacggcccgtctgtcgctctttcggcgtaacgtgaaatttgatctgctccccgcgcaaaacggtgtccagcgcccgcagattcatcgagaaaaaggagaggtaagaggcccggccgtcccaggcagaaatgccccaggtgccgaacataaaggccagttcggagacaataaaaaagggtaaaaagtgcagatagaaaggggtagaccacgccgacaccggcggaatgccggtgaagagatagataacaggcgagatcaggaatacggtgttccacacgcaggccagatacgaccagaaggtggtcgcgtacatcagcgtttgcggcagcgagagtttaaagcggcgtcggttgaagatgttgtcatggaacaggatatccagcgatccggcggcgtacttaaagcgctggatcatccacgtcagcatatcctgcggagagagcattttcgactcaatccgcgggtgcattaccgagcgccagcggcgggcagcgtcgccgtgcagcaggatggaggtataaatatcttccgagacgtggaacttatagggcgtcagttcagtatcgaaggcaacgtgggggcgcatggcgtcctgcagcgcttcccgcgttgccgggtcacgaatatcccgcgtatgacgcgcgatttcggcgtcaacgctccagacgtagctgcgcagcgccgcctgcatcaccgcttcccgtcggtgaacggaggcggcgccacagcagaacgcggcgttagcccagttgcggcgccgtaaaatcacgtcgtaaaacatgcgcggatcgttgaaaaaaggatcgcgaccaatggtcaccggaccgacgattttctgcgccagccagcccacgccatagcctgcaccgcctgctttacgccgcagccagctcgccagatcctctccttccgggagatcgaaaaaccattgtggggtctgcacccaggcgacgtccggatcgcgaaaatagccgagcgtgtggctcagcagggtcgggaaaacgcgggtatcggcatcacagatgatcagaaagtcgccatcggtatgttccagcccgttgcgcaggttaccggccttgtagccgatattgctctgacgggtgatatagttcgccccctcctgctcgcagaccgccttcatctccgggcgacgcccgtcgtcaaggacatgcactttataatcgagcggaccaggataggtcatctgcatggcgtcacggatcgacagcctgaccagctccacgtcttcggaataggtggcgataaacagatcgactttaatcggcctcgactccaccgtttcatccgcgcgcagacagtcgttgatctccgtcggggggacccctggcggaggatctttttcctgccataaattaatggtgaacagaactgtgccaatccacgccagggtttccgccagcaccagagggatcgcataccacagggcgtcagtgtttaaggacgcggtccagcgccagtaaatataattggcaccaagcaccagggcggccacagctaatacctgccaaatcattctcacccagcgcggggtgctgagcggttcaggcggtcggcgatgttcaaaacgggaaaaataaaaatccatagcaaggatatcctgattccgcgctgggtttgaatgacaggtctgttatcgattgggggcgttctgcagaacgcacaggggcttataaataacagtaaagtgagtgtagatggtggcgcaaaaatttcaacagcgcgaaatgatagtcaccgggatgacttaacatagtgtgatacacgccggcggaatttataaaacgaacattgcaagatagcccattctacactatctaaataatttgtaataaatgttgcagggtagacggcaggatccctaatgagccaggttgcttcagcgatttcgcaaaaagaaactcataaatcaatgccctggcgttactctctgaccggggatcgcgacctgcgtatcgactttatgcgcggtattgctcttgtgatgatggtggtggcgcataccgaagtgatgtcgatatttaatattttcagctgggaacgatttggtttgaccaccggtgccgagggctttgtgatcctgtccggcttcatgttagggatgctaaatcgtgtcagattacaaaaggcagtattactgacggtgagctgggggctttatcttcgcgcatggaaaatatatcaggttaatattattattattgtctcttttcttttgctgagatatttgccttatcttaatgtctatgaagtcactcattttaccgaccgcttttccgggaccagttggtcgctctatccgctaaccccgcaaataaaagagacgtggtttaacattatcctctatctgcagattggcccgcatcagacgcagatcctcggactctatatttttttgttattgctcagcccgctgtttctgggaatgctgcaaaagggtcacgtctaccccttactgggcgcctcgctgctgatatacggctgctggcaacgctggccgatacgggtcacgccctgcgaatttgaattcgcctttcccctgctggcctggcaatttatctttgtgctgggcatgtgctgcggctggtacaaagcggaactgatctctttcgcccgcacgccgcccggcaaagtcgccgtggcggcgctggtgttcatcgcgcttatccttgcgtttgtcgcccagaaccataccaatccttttatgccgcccgcgctgctgttgcacgtaatcccgccggcggattttaacgccttttaccatacctgggcggcgaaaaacggcctcggtccggtacggatcctcaatgatatcagtctgatggtcaccatttatctgctattgacctggtgctggcgcccccttaaccggctggcaggctggttcctgatcccgctcgggcagcgttcgctctacacctttattttgcatgtttacatcgtgctcgccgtaagccagctggttaccttcgatctgtggcgccaggcgtggatagagaacaccttgattcatgccgccgcgctgggcgtactgtggctgatggccaaataccgcgtcgccgcacgctggatacctaactaaggaagggcaaatgcgggagaaatatatgctggcctgcgcgctatggtgcgccatcgcaggtgcggaaggcgcagagaagaacgacgcacaaccgctgcgtgataaaaatggtgaaccggtgcaggccggcgtgtttaccagccgctggggacggcttttttccgggaatgacaaggtgttttcgggagcgctgagctttagttcgggtttaaaagagcagtggatgaccgtccccaacagctcagacagcgcagaacagaagaaaaaatataatcagacgctgaatcttagcctgcaatactcgccctacagcttctggttcgccaacgtgacatcccgtttaccggtgactgacaccagccgctataccgccgattttcgctatagttttggctacgacgactggcatgccaacaccttcagcctggtttacagtaactatggcgataaccacttctggacctcgggcagcaagcgtcacacctattttgagcagggggcgattaccctggcgtataaattttcgctgccgaagcccatggagcatgcgctgttgattaacaaaggcgacgccattatctgccaggcaggctacagctgggtgccgcgttattacgatctggagagtaacgatatccgcaaaaacaaaaatgtgctgcttggggggtgtggatatacctttaaacaacatttttttgtgcgcgccaccgcgttctggtatccggacagtagtcagcagcagccgtggaatggcgattatagttacagttttggctacgcgggctatacgccgggatcgttctctgtgcagtatgccaactatgccggtacccgctacccggggcatgacagcggcagcggcaagtttcgtgaaggcacgatcagccttacctggttcttgccgatttaggaggcgcgatgtcggcacagcacgtcctgattgttgaagattcgctggtttatcgtcggctgctaagccgaatgttgacgcagtggggttatatcgttagtgaggcggaaaacggtgtcgacgcgctggcgatcctcgaaaaccagcctgtcagcctggtgataagcgactgggagatgccggagatgaatggcctgacgctatgccgggaaattcgccgtcgccagtttggtcgctatgtttatctgatattgctcaccgcccgcgaagaccctggcgatttaacgcaggggtttgaggcaggggccgatgattttctcagcaaaccggtagagcagagcgagctgcgggcgcggttgcacgccggggcgcggatcctctccctcgaggctgacctcgccgcgcgcaatgcgcggctgagcgaagcgctgcgacagattgaacaggatctggagctggcggcgcgcattcaacagtcggttctcccggctcatcagctgcgccatcagggatttttctccgactggattttcctgccctcggcctgggtgtcgggggatatttttaacgtcttcccgctgggcgatcgtctcggattttactgcgtggatgtctccggacacggcgtgggggcggcgatgatgtcgctcgccgtcgcccgccagtttttgcatggcagggccgttgagcgctttctttttacggcagacaaccagccggcgtcgccggccgaggtggtggcgatcctcaatggtcgtttttgcagtgacgaaacagagatcgtcagctatttcacgttgatctatggcgtgatcgacctgcagaccggtgcgggcaaactctgtcaggccgggcatcccacgccttttatcgttagcccggacgctaccgtccgcccggtcggcagcggcggggcgccggtggggttgatagaccatctctcgtgggcagatgtcagtttttcgctggcgccgggagagcggctgtgcctgttcagcgacggtatcaccgaatgtgaaaaccggagcggtgaacagtttggcgaggcgcgcttgcaagcgtggctgcaggacagcgtgacgcagccgctgcccgcgctgctgccgcgttttgcccggcacctgatccgctggcgcagtggcgacgcgcaggagacccaggcgatggccgatgatgtttcactcttgattattgaacgtacaggggacagtgatgaaaattgaaactgaacggcaggcctcggtgacgatcctgacgccggcggtgcgtcggctggatgcttccgtcgcggtagcctttaaggcggcaatcgcccaggagataggcgaagatagcaccgatctgattgttgatttcagtaaaatcgattttatcgacagcagcggtttgggaacgctggtttccctgatgaaaatgatgaacggtaaaggagaaatgacactgtgcgcgctgaaccccggcattcgcaatatgtttaccctgaccaggatggatcgtatttttcgtatttgcgaggatcgcacttcagcccttgcgcagttcaatccgtgacgcgcccgtgaataacgtcatgaattttcctgcccaactcagctcgctatcaacgctggcggcgtggctggctcaacaaatggcgccgctgcccgtcggggaggagtggcgcttcgcgctcgatcttgccgtctgtgagacggctaccaatatcattcgctatgcgttgcatgaggatcggcaacgtgtttttcgtgtcgaatttatcgcaacggaagaccgggtgacgctgcgctttattgatgcgggagaggtctttccggccgagcgcctggcgctggcgcgtggcgatgagcgcttcgatgtcgatccgttagcggaaagcggcagaggtttgcggcttattctgcgcgcggtggactattttaatgtggaaacccgcgccggggagaatgtgacgaccctgataaaagcgttgccggatgccgttcttcgccattccaccgacgatcgcgtcaggtgaaggaacagagcttgcccccaggtgaatccccgggggaattttcccgcccgcgttcaccctcttcatccgtcttatggctgggcctgagcggtggacagcgcgcccaggtgataagggcgaagagtatctaacgtcatcatggccgatttgcagaaaatgcatttcgcaccaaagggatttttttccgtcacgtcaaactgggacgttctgtactgggagccatggcagcatgggcatctaaaatggatatgttcaatcataatgtaaaccttgtatgggtaatgttctgttgaaaagacaatggtcgttttcagggaaattaacgcggctgatttttgttaggagtaagccgggtattgggtcagtcggagggcttgtttaacgagccaacagggggctgacagggcctgtttacagaaaaagcaaaatactaacgggactgctcaaaggaaggtggtatcagggataacgcctggagatgagaacacgtacttagataataacttttcgtctggtaaatcgacttaacgattaacgcacgagccgcaaataatagcaaacattattttagccttccggatgcctgctgcgccaggggcgccttcatcagcaccgtcacccagtcgataaatacctgtacccgggcagagagctgccggctgctggggtagagcagggagagcggcagcggcgcagggcgaaaatcagccagcacctccgttaatactccggatgccagatcggcctcaaggcgggataagggtgcctgatacaggccaaagccaagccttgacgcttcggcgccgacgtcggcatcggaggtcagcagccgacagggcaaactgacctcggtctggcgaccatccagggtaaaagtcagcggcaaggtacggtgcgtgcgcgctgaaacaaaaccgatcgccacgtgtcccgccagcccgtcaatcgtatgcggggtgccgtaccgggcgaggtaggccgggctggcgcaggtgatctcctgtagcctggcgagcggccggcaaatcatctcgctatcgggaagatggccgccgcgaatgacgcaatccaccccttcgcggaccagatcgacgtcgcgctcgctttcgcctatctgtaacgtaatggccggatagcgggcgagaaactgcggcagcgcgggcagcagcagggttcgcgccagattgcccgccacgtccacccggatggtgccggagatgctccccccggcgctgcggttggcctcctccagggccgccaggatggacacgcagcgctgataatacagcgagccctccgccgtcggctgcacgtgccgggtggtgcgctgcagcaggcgcgccccaaggctagcctccagcgccttaatggctgcagtcgccaccggccgggaaaaacccagatccgcggcggcggcgctgaacgaaccccgttcgacgatgcgcacgaacagggtcagggtatccagtttatccatggcattgttcctgctggcaaaacaatcctgtcgcgccatgcggtcttatcgtcggcattcagaggcctataatcgctcatgttttcagcagagataaaagggggaaacatgaacaatagcgcaaaaatcgccctggtgacaggcggcagccgcggcctggggcgcgcaaccgttgaagcgctggctcagcgcggcgtgaacgtggtattgacctacaacgcgcattttgccgaggcgaacgatgtggtcgcgcgggttgaagctcagggctcgcgggcgatcgcgctgcccttcagcgccggcgaaaccgacacctttgacgggtttgtcagcgcctttcaggaggcgctgacggagctgggggccgatcggtttcattacctggttaataatgccggcaatgccagcggcatggggtttctgaatgctaccgaatcggagttcgatgcgctttatcgcatccatgtgaagggggtttttttcctcagccaaaaattattgccgctgctggcggatggcgggcgaattgtgaatatctcgtccggactgacccgtatcgtgatggcgaaccgggcgccctatgcgatcatgaaatccgcggtggaaaccctgacccgttatatggcgtttgagctgggcggccgcgggatcacggtgaactgcgtagcgccgggcgccatcgccacggatttcagcggcggggtggtgcgggataacccgcaggtcgctcaggcggtagcgaacatgacggcgctgggccgacctggcctgccagaggatatcgggccgatgatcgcctcgctgttatccgatgatcatcgctgggtgaatgcccagcgcattgaggtttccgggggaatgcgcatctgagcgaagaaaaccggggctgttttcatccgtagtcaatcgatatgtcagtggatgccgatatagcgcgacgctgtggagagataaggaaattatgatctgccgcgttgctcgttaaatattagtgattgaccttattgcctgaatgcgcaagattattgttgaataaacagtcaatatgctaaatatatttaatgcacgtatgaaaggatttaagatatggattttgaaaatgaactgaccagtaagatccttgatcccattcacggcactattcgtttgacgacactcgagattgcctttatcaatcaccccctgttccagcgcttacgcaacattaaacagaactcttttttatataaggtgtttccctctgcggtgcacagccgcttcgaacactctctcggggtgctgcatttatcaagtgaaatactcaataatttacgcctgaatgcgatacggtatcaaaagaaatatgatgatggccatgtgtttggtcatatcgatcagataccaaaacacaacattcaggagttgagactcgctgccctgatgcatgacatcgggcacgggccggtatcccaccagtttgagagttttatgcctggtaagcacgaattctccgatgttctccccacagcctaccattcaatcattgatgtattaagcaagccagaacagaaagttgaacatgaacagctttcgctgttgttcagcctgatgatttaccatgatctgagaaaacaaggtaaggtcgatgacgaaataaatatcgaaaatgtgttaaaaatcatcgaaaaaagatacggtgaccaacagatcattgaggaaattaatggaaaggcaacagatatcctgccgttaatgacctcgatcatctcttcctgtccgatcgatgccgaccggatggattacttgctcagagatggctatttctccggcgtcaagtgtggcatctacgattacaatcgcttgtttatgtcaattgtcccggtcgaggaacagggaaaattgtaccttgcttacaaagagagtgggattgattcgatcgctgagtttattggggcgcgctccagccttttctcgcaggtgtattaccataaaacaaaccgcgcctttgcgacgatgttgagcacattatgtgagattatgcaaagcaaggatccacaaaatgtcattatcgctgacgttaccgaccgtatcgttgaccatagcgatgaaagcttcatcgatgcgctgaaggatttttatttggcgtgcagtgatgattattttttgaatgacaaggttggtgaatggatagatatcagcgataccgaggcggttaataaaaaaatacttgatgacattattaaccgacacccatggtcgaaggtctatgaggccaaacactctgtgtataaagctaacatcgctgacaaggaaaataaggcgtggaagagtcaactcaccgggttattgacttctgtattacagcctcatttcaaaccacatgaatttgccgttgatattgtctccgactgcgcctttaaagacctggataaaaccgaagttaagcttttggtgaaagatcttaagaaccgctacgaaataaaaccgttaattgaatgtggtgataagttaaatcagtatcaaatcatcaaatattgcattcgggtatttgttgaccgcgatatcaaagaacgcgtaactcctgaaataatctataaaatcaatgaaatagtggtcaagcagatcgcgttgctgaattgatgatgcccgtcagggcagcgataaatctttcaggggctggttttttaaccggcccctgaagataagcggtaaatcgtggcgcatccccgccatcggtataacttacaacagcgcctttacccgagactaaacaccgcgctgaggcatagattcccgcaggggagcgggtggctcaacaaaaacgccggctcagtatggttattccgccagcagggcggcgaatttcgccagccactgtggatgagccggccaggcgggggcggtaaccaggttaccgtccacatgcgcctggtcgataccaatatccgcatagtgcccgccgctcaaacgcacttccggggcgcaggcgggataggcgctgcaggtgcggccctgcagaataccggcggcggccagcagctgcgggccgtggcagacggcggcgataggtttacgcgcggcgtcgaatgcctgtaccagtttaataacctcctcgtacaggcgcagatactccggcgcccggccgccggggatcactagcgcatcgtagttctcggcctttactgcggcgaagtcagcgttcagcgtgaagcgatggcccggcttttcgctataagtctgggcgccgtcaaagtcatggattgcggtcatgacatagtcgccagcggttttatccgggcagacggcatcgacctggtggccaatcatctgcagcgcctgaaaaggaaccattgtttcgtaatcttcggcataatcgccgaccagcattaggattttcttgctcatctttgtgtctcgttgtgggcgaaaggtgtcttagatatagcctggcgacttgcagaatgcgaaccgttcaggatgccgacgacggtgtcgtgtgcgtcttgtaaccgggttcatgtttttttgctaacgacaactttgtccgacatcgcgctgtggctcgttatccgcaaaaaatcggtttgtggggagtaaggggagcagaagaatattgttaccgtttagatttcgcgcctgcactattaagcgtccgccgcgaacgggcaatcggatggaagccagatattatccctctgagtaatttattgcgttgttacgctaaatttgcataatgagcgaattatattgccccgggcgtctctatggtttcctttattcatccgcttaatgttttagcccgtcttatagtatcctttgcaaacattcctttggtgcattatttattgaatttatcattgacggctgtttcatattttaaatattgatattcatggtgcttttattttcgtggtgaaaggggatgtttatgaataaatataattattaggtggttaagttgatcgctaatccatttttgctttatcatcgtcacgtttcacatcaatatatcttcaataattattccttaaggaaaggaactgctatggctgatacgttccagaatgaagtccccagggcgcgcattaatctcaaattatctcttcataccggcggcgcgcaaaagaaggtcgaactgccgctcaaactgcttaccattggcgattttagtcatggtaaggaaaaccggcctttatcggaaagagaaaaaatcaacgtcaataaaaataactttaacagcgtactttcggaatttagcccggaagttaacctctcggtgccgaatacgctgaccggcaatggcgaagaggagaacgtcagactgcgttttaccgacatcaaagattttgaaccggagcaggttgcccggcaaattccgcaactccgcgccatgctggcgatgcgtaatttattacgcgatctcaaatccaatctgctcgataacgccactttcagaaaagagcttgaggcaatcctgaaagatccggcgctgtcccaggaattacgcgacgaaatgagtgcgcttgccccgaaataagtgcggggcaagtctgttaatggattaaccgggaaaatgctaatgtctgttaccacagaaaacgcccctgttcaggggcaaaccacgctgcaggaaaacagcgcgggcgagggcgtttacgcctcgctgtttgaaaaaattaatctcaccccggcgtctcgcctcggggatatcaacgactttctggacgatgccgcgctctccgaggcgccggcggcggaacgtctcaccgcggcgatgcaggtgtttatggaacgcatccgtcagtccggccagcgggtggaaaagctcgacaaaacgctgatcgaccaccatatcgccgagctggatttccagataagccgtcagctggacgcggtgatgcaccatcaggagtttcagcaggtcgaatccctgtggcgcggcctcaaacagctggtggacaacaccgactatcggcagaacgtcaaaacggagatcctcgacgtcgccaaagacgatctgcgccaggactttgaggacgcgccggagcttatccagagcggcctctactggcacacctataccgcggagtatgacactcccggcggcgagccgatcggctcggtgatctcggcctatgagttcgacgccagcccgcaggatgtggcgctgctgcgcaatatctcccgcgtctctgcggccgcccatatgccgtttatcggcgccgtcggcccggccttcttcctgaaagagaccatggaagaggtggctgccattaaggatatcggcaactacttcgatcgtgcggaatatatccgctggaaggcgtttcgcgaaactgacgatgcccgctacatcggcctggtgatgccgcgcgtgctgggtcgtctgccgtacggtccggacaccgtgccggtgcgcagcttcaactatgtcgagcaggtgaaaggtccggaccacgaaaagtatctctggaccagcgcggcgttctccttcgcatccaatatggtgaagagctttgtcaataacggctggtgcgtgcaaattcgcggtccgcaggcgggcggcgcggtgaaagatttgcctatccatctgtacgatctgggcaccggcaaccaggtgaagatcccttccgaggtgatgatcccggaaacgcgggagtttgagttcgccagcctgggctttatcccgctgtcgtactacaaaaatcgcgattacgcctgcttcttctcggccaactccgcgcagaaaccggtgctgtacgataccgccgacgccaccgccaacagccgtatcaacgcgcgtctgccttacatcttcctgctgtcgcgcatcgcgcactacctgaagatgatccagcgcgaaaatatcggcaccaccaaggaccggcgtctgctggagctggagctgaacacctgggtgcggagcctggtgaccgaaatgaccgaccccggcgacgagctgcaggcctcccatccgctgcgcgatgccagcgtggtggtggaagatatcgaggataacccgggcttcttccgcgtgaagctgtacgcggtgccgcacttccaggtcgaggggatggacgtcaatctgtcgctggttagccagatgccaaaggcgaaggcgtaggttcggacgatgatgaaaacggaacgtccgttgtggggccggggcattatggtgtcgcctcagcattttcaacagcaggctgcgtatgcagcctggactgcggaagtgattgcccggatgggtcttaaccacccctggggagtggttgaggcgaccttcgaaccagagatgctcaaactgggccgcctgcaggctcacaggctgcaggtccggttccaggatggcacgatgattgatacggacaatgccgatgcgctgccgtccgcgctgtcgctggacggcgcgtccggcgaggcggtgatcgtgctggcgctgcccctgatgcaggcgaatggcggcaactgtctgaagccggaggaggtggccgaaaggccggtgcgcttccgccagcgctggcgcgatgtccgcaaccagtttggggatgatacccggcagattgccgtcatacagccggagctgatcctccgcttcgcccaccaggacaacagcgattacctgacctgtccgcttgttcgcctgcagcgggactcgcagggggcctggcttatcgacgagacgtttctcccgccgctgctgcagatccagggcagccgctggctggcgacgcagcttgaacagctgctcgtccagctccgggctcgtctgacgcgcctgatggccatgcgtcgcgaaagcaatgaacggatggctgattttgccgtggctgatgtctctctgttctggttgctgaatgcgctgaacagcgccgagccggtgctggggtactttctgcgttaccggcaaagcccgccggaacgcctctacccggagctggcgcgcctggctggtagcctgctgaccttttcgctcacccatcaggcgaatgccgtcccgatctatcagcatgaccagctgaacgcggtttttccgccgctgtttgatttactgagcgacctgctggaggcgagcctgccatcgcgggtggtggcgattgcgctggagcatgatgtccggctgcacttctggcaggcgcgtctgcacgatgcccggctgcgggaaggggctgattactacctgtcggttcgttcgtcggtaccggtcgcccaactgcaggagcagtttccgcgccagtgcaaagtgggcagtccggatcatgtcaaagccatcgtcaactcctcgcggacaggggtgcccctcacgccattgcgtcatgtgccggcggcgatcccgctgcgtctggaaaatcagtatttcagcctcgatgtgtcccaccctctggcaacggaaatgctgcagagcggcacctgtatgttttacgtcccggggatgctcggtgagcctgaacttgaactttttgcggtactacgaacgtgaatgagcctaaacgcggcaacgccgcgtccattgatattgatgcgctgctgcagaacacctggctgcaggttatcagcctgcgccacggcccgcagttccgcgatgaggaagggtacacgctatggcagcgctgtattgctgatgtcgagcgcgtgcaacatgagctgaaggtgagcgggcttgatgacgccagctgtcagcatattctcaccgcccagtgcgcgctgctcgatgaagcagtgaaaggtcgcggcgtggaggatgaggcctgcctgcagtggtatgacattccgctgcaggggcacttcctcggcaccatggacgccggcgacaccctgtgcgagcggatgcgtgatgtgttgcgtgaaccggcgcccaacctggccgtggtcacctgttttcagcgggtgatgctgctgggttttattggcagctttcgctccctccacgaccccgagcgcctgaagctggtcaacgcgctcggtgagcgtgttcctccttttcagtgcccggctaccgctcccgtactggtagagagtcgcgccggtctggggataagcggctggctggccccatggccggtacgtattggcctgagcgtggtggtggtactcgccctgtggtggggactcaaccactggctcgatcacctgctgctgaccttgttaccgggggaggtgaaatgagccccgcgcagcagcgtgggctggcgctgtgggccagtctgctgagtgcgctggtgtgcctgctatttttgccggttccccgctggggggcgtggctcattctgctggtcacgctggccctgatcatcgggatctggcgcatcgccagtcgtcgtaccggacgtaacgtcgcatcaaccctggcccctctcccggagggcgcttatcgccagccggtggtcctcgtttgcggcgacctgccgtgtgtctggccgccagcgtcaccggtgcgagtcgtcaaacagggctgctggatccgcgtggaaaagacggaggagctgcagcaggtcgcgcgccaggtattgagccagcggccggaatgggggcctcagctgtcggtgctgctctgcgtctgcccgcagcggcatgcgcaaagcgatgcgctgaccagcgctctgctggccctgcgctggcaactcagccagctgcgtcagcagacggggtatgccgtaccgctggcgctgcaggggcaggtgggcagcgcgatgagtcgcgacctgttgtggcaggcggcgataccgggtgaagcggtgaaagtctggcagccctcctgcgccccctgttccgtaccggcctgggtaagcgccggtggggcggccgcgctggagcagcaggtgctgatgaacagcctgatgggctggtttgaacagcacgtccatgccgtgttgacggaagagaataccgacctgccacctctgccccctgcggccgtgctgtgggggctcgggccctcgctgcctggaaggctggcatcgtcggcctggacgacgtggttatcccgacatagcggcctgtcgcgggtagctggctggcagcctggcgagagcgacaccggggacgcttcagctttgccggaattcatcctgccgcagttaccggcgggacggggactcacgccacgaggctgggcctggcgcgcggcgctcgcgattttcaccctcgcggctgtcgccgcgctgctcagcagtggctggaacaatcgacaactgctgcagcgcgtgggcgtcgatattgcccgttatgagcggattgcgatggatgattatcgaccaaaagccagcgctgtcagggtgctgcgtgaagatgccgcgctgctcgatagctgggcgcgtaacggcgtcccgctgcgcctgagtctgggcttgtatcacggggagcagattcgcctgccgttgctggaggcgattcgcggttacgtgccgcctccgcctccgcccaggccggtgcagcacgtcgcgccggatgtcatccgccttgacagcatgtcgctattcgataccgggaaatgggtactgaagcctggttcgacaaagcggctggtcagctcgctgatggacattaaggccaggcccgggtggctgatcgtggtggcgggccacaccgacagcgtgggtgaggaaaaagccaaccagctattgtcgctgaaacgtgcggaatcggtccgcgactggatgcgcgataccggcgacgtgccggacagctgctttgccgtacagggctatggcgaaagccgaccaattgcaacaaacgatacgccggaaggccgtgcgctgaaccgtcgtgtcgaaatcagtctggtgccgcaggtagacgcctgccggttaccggaccaaccctctgcgtcatcccaggatgatggcgcttcactacacaatggagagtaattccatggcaattcctgtttatctttggctgaaagacgacggcggcgcggacattaaagggtctgtcgacgttcaggatcgtgaaggcagtatcgaagtggtggctcaggagcataacctgtacatcccgaccgataacaacactggcaaactgaccggcacgcgtattcatacgccgttcctgttcaccaaggagatcgactcctccagcccctacctgtacaaggcagtgaccactggccagaccctgaaatccgctgagttcaagtggtaccgaatcaacgatgccggccaggaagtggagtatttcaataccaaacttgagaacgtcaaggtggtgaaagtgaatcccctgatgcacgacatcaaaaaccccgcctacgagaagcacaaccatctggaacagattgagctgcgctacgagaagatcacctggacctataaagacggcaacatcattcactccgatagctggaacgaacgcgccaccgcgtaattgcccgtcatagttcgcgccgctggcgcgcaggcgacgttcgctcatcccggccgcatcgttatctttgcggccggggattattgcgggcgatcgcctgatgcgggcagcgtttctctgcccgccgttttttgctgagcgcctgagatacgggttctcagcaaagaaaaacacaatctgtctgcctgaccttgtgcgcttggggttcctgttcgggaacagcgacgggcggtagcgtgtccggaaccaataagagaggatctcatggaaaatccagccagcctgttacgccgtcttaatccctgctgtgcccgcgcaatggagggggcggcctccctgtgccagacccgggcgcatgccgagatcctgcccgagcactggctgcttaagctgctggaacagggggaaggcgatctgacggtgctggcgcggcgctatgaatgggatatggatgcgctgtggcaggatctgctgaactggctggataaacagccgcgctcggtacgtcatcgtccccagctctctgaccataccctgaggctgatgcaggaggcctggctgattgcctcgctcagcggcgaagcgcagatccgcagtgttcacctgctgatggcgctggttgaaaaacagaatctgatccagtgcgatggcctgtggccgctgttaacgctgggccagcgtcagctggaacgcctgcgccccttgcttgatgcccagtccgacgaacgtccaccagcgcagcaggaagcggcgctggcgcagccccatggcggggacgtggaatttgtggggcgtcctgcgggcaacgaactgaatgcggatgggctcaatccggcgctgcagaacgcgctggacaaattcactctcgacgtcaccgccaaagccagagacggccagattgacccggtgttcggacgcgacacggaaatccgccagatggtggatattctctcccgtcggcgaaaaaacaacccaatcctcgtcggtgagccgggcgtgggcaagaccgctctggtggaaggcctggcgctgcgcattgccgaaggcaacgtccccgacgcgctgaagccagtgtcggtgcgcacccttgacctcggtctgctgcaggccggcgccggggtcaaaggcgagttcgagcagcggctgaaaaatatcattgaggcggtacagcagtcgccttcgccggtgctgctgtttatcgacgaggcgcacacgatcatcggcgcgggtaatcaggcgggcggcgcggatgccgccaacctgttgaagccggcgctggcccggggcgaactgcggactatcgccgccaccacctggagtgaatacaagcagtacttcgagcgcgacgccgcgctggagcgccgctttcagatggtcaaggtggatgagccggacgacgacaccgcctgcctgatgctgcgcggcctgaagtcccgctatgccgaccaccacggcgtgcatatcacggatgatgcggtgcgcgccgtcgtgacgctgtcacgacgctatctcaccggtcgccagctgccggacaaggcagtggatttactcgacaccgcttccgcccgcctgcgtatgagtttggataccgtgcctgagccgctgacccgcatgaaggcgcagctcaccgcgctggcaatggagaagcaggcgctgctggaagatattgcgctgggcaacagcgcccgcggcgatcggctggcggccattgagcaggaggagatccgccttattctggcgctggatacccttgaaactcagtatggtcaggagctgcagctgacggaagcgctgctcgcctgtcgccgcgatatctcccgccaggcggaaattaacgacctgcaaaacgcgcttatcgccgtgcagcagggcaatccgctgctcgggctggacgtcgacgtccgcaccgtggcgacggtgattgccgactggaccggcgtgccgctctcctcgctaatgaaagatgagcagacggaactgctgagcctggaagagagtctcggcaaacgggtggttggccaggaggcggccctgagcgctattgcccggcgcctgcgcgccgcgaaaaccggcctgacgccggagaacggtccgcagggtgtgttcctgctggtcgggccgagcggcaccggcaaaacggaaacggcgctcgccctcgccgatgcgctgttcggcggcgagaaagcgctgatcaccatcaatctctccgagtaccaggagccgcacaccgtcagccagctgaagggttctccgcccggctacgtcggctacggccagggcgggatcctgaccgaggcggtgcgcaaacgcccctacagcgtggtgctgctcgatgaggtggaaaaggcccatcgcgatgtgatgaacctgttctaccaggtcttcgaccgggggtaatgcgcgacggcgaggggcgtgaaatcgactttcgcaacaccgtgatcctgatgaccgccaacctcggaagcgacctcctgatgcagttgctggatgaacagccggaggccagcgaatcagacctgcacgagctgctgcgcccggtgctgcgcggccacttccagccggcgctgctggcccgcttccagacggtgatataccgtccgctgccggcggcagcgctgcgcgccattgtcggcatgaagctcgggcaggtaagtcagcgtctggcttgccattacggaatcaccaccaccctcagcgagagcctgttcgacgcgctgaccgaggcctgcctgctgccggataccggcgcccgtaacgtcgacagtctgctgaatcagcagatcctgccggcgctgagtcagcagctattgagccatatggcggcggggcagaaaccgcgccaggtgacgctggggtatcacgaagaggaaggcgtcgtgatggcgtttgacgaggggacaatatccgatgagtagcgtgaaatcgttgttgttcagccataaccaccacctgctttcggtgaagggatgtgaagccgggcttgatgtgctggccttcgagggcgatgaagccctgagccagccgttccgctaccgtattgaattcaccagcgcagaccatgccatcagcaaagagatgatgctgatgaaggcagcctccctgacgctgcaggcgtcggtggctcagggcttcggcatcaatgttcagcaacccgtgcgggtgatccagggcgtggtgacggggtttgaacggctcagtacctccagggatgaaacgcactacgcgctgacgcttcagccgcgcctggcgctgcttaaccgctcgcaccagaacgccatttaccaggaccagtccgttccgcagattgtggaaaaaatcctccgcgagcgccacggcctgcgcggtcaggattttctgttctcgctgacaaaaacgtatccgcgccgcgagcaggtgatgcagtacggcgaggatgacctgcgctttatcacccgtctgctgggtgaggtggggatctggtttcgctttaccgccgacacgcggctgcacatcgacgtcgctgagttctgcgacagtcagcagggctatgagaaggggctgacgttgccttcggtcccgccgtcagggcagcagtcggccggggtggacgcggtgtgggagatggcatgtcgccaccgcgttgtggagcagcaggtcagtacccgcgactacaactaccgcgaggcgacggcggacatgaacgcgcaggtggatgtcacccgcggggagaccaccacctttggtgaggcttaccactggggagataactacctgaccgcggggaatgtccatgaccgccatccggcgccggagtccggggcgttttacgcccggcttcggcatgagcgttatcttaacggccagacccggatgcaggccaccaccagctgcccgacgctctgcccgggacaggtgctgaaggtcaccggcggagaggaggtggccggggagtttgctgatggcgtgctcatcacggcgatgcacagccacgcccggcgcgatgccgactttgcggtggagtttgccggcataccggacagcccggacgtcggctaccggcctgagcccggcgcgcgtccggtgatggccgggacgctgccggcccgcgtgaccagcacccgggaaaacgacacctacgggcatatcgacaaacacggacgctaccgggtgaatatgttgtttgatcgggcgcgctgggaaaccgggttcgagagcctgtgggtccgtcagtcgcggccgtatgccggagacacctacggcctgcacctgccgctgctggcggggacggaggtggcgattggctttgaggatggtaaccccgaccggccgtatatcgcgggcgtgctgcacgactcggcgcacggcgaccacgtcaccattcgcaatgacaaacgtaacgtcctgcgcaccccggccaacaacaaaatccgcctcgacgatgagcgcgggaaagaacatatcaaggtcagcacggagtacggcggtaagagccagctgaacctcggccatctcgtggatgctgaaaagcagccgcgcggcgaaggctttgagctgagaaccgacagctggggcgctatccgggcacagaaagggatatttatcagcgcggacggacaagtgcaggctcaggggcaggtgctggcgatggagccggcggtcagtttgctgaaaggtgcggtgaatcaggtcacggaatggggaagcattacgcaaacccatcataatgttatcccagacaccggcccattaagcgcactgaccacaggcgccagcgatcttaaacagccgacattgctgatgtcggccccgcaggggattgccgcagtcacgccggaaacaaccctcctgcacagcggtaacgggctgtatctgcagagcctgggagaggtcaacatcaccacggcacagcgctgttctctgaatgccagccaggctatttcactgctggcgcaacaggaggggatgaggctggtctccgccaaaggtccgctgcaagtagagtcgcacggcgatattctatcgctgaccgcgctaaaagatatcaccgtccagtcaacccaggggcatctgcagttgacggctaaaaatggcatcaccctgggttgcggcggcgcatatatccgtcttaccccgcagggagaggtacagatccacggaccgggggtgattagccttaaggggcagcatgatttgcaggggccggtcagcgaggagtttcccttgcctgagctaccggcatcggtgtgtaaagagtgccttaaaaaagcccaggcgctggcgcagggcttcgtgccgcgggaggcatagatgaccagacaatggattgaggaggtcgccggaacctgtcgggctttcggaacggattatctgcatgtcattatcgatcaggcgggggtggatttttccgttattccggcgctgaattcgctgtcagttgagtggcagtcgctttttcatggacttccggaagcatttattgtcgatgatgctccgctggtggcgcgctttacgcttgatgatcttgagcaaatgcgctggttacaggatatcagccagcaacttgccatccaggcgccgctgctcctgttctgcacatattggcccttttcggcgctagcgaactggctcacgcagtgtatggatattctgcaggaagggcgcagcggaattttacgcttttacgatacccgggtatttccgctgttgtttacgcacattctcagtgacgagcagcaagagccattgatgcgtccggccctgttttgggcgtggcaggatcttgacggccaggcgaaaggcatcaagggcagtggtctcccgccggaacgcgatgaaaaggcgccaaaaatagaactcagcgatcgccagcttgagcatctgatgtgtatcagcgatgtcatcgtcatgttgtcgcactgtgctccgcctgcgggcatgtttgactcaagacagtcactgttttcggcctgttaccagggcatggtggaggcgacacgccagggtcttcttctggatgacgctcgtgaagactgggtaatgaagaagtggcttgccgacgtaaaaaccagtgagagaccttcagaatgaaaagcctggtctggctgagtacacccctctcttcattaccctcaaaccgatagggagagtccaatgaaatctgcattaatcagcccgctgctggcggggttgctgctgttaactggctgcgcgcagcctgctgcccgggccggaggcggcggtggcggcaccattgacgccatcaaccacacaaaatgggcgatcaaccacttcagtatcaacggtcagtcgggcatcgacattataggtccgtttcaggggggcggtggcggctgctgcttcagcgtgcccgcccgctggacgccgggtatgacggtgcgcgttgactgggaaagtggagtcgcatttgccagagacattcctgaaattcctgaacctgcttatccgaattataaagggcaggataataaagtctggaccgaagaaatagcagaatataaccaacaaaaaagagtttggtataaaaaaatcaaagcactaaaacgtcagcacagcaaaaccgtcccgctgcccgactataacggccaggatgtgtgcggcattacggtgcactttttaccctgcgatgacgtgaaggtgaccaccagctgttacacctacggcagtccgtcctacccgataaaagagcctgtcaggatgaaggagcccgccgtatgtccgaaataaccgaaacccatgccgcctggatcccgccgccgtttccgccgcagggacgtctgccgaaccgggcgctgcaggttgggcagaactgccatcagcagaacagcgacgagcggcgctatcaccaggaactgtgccgggctgccggacgtcgcgtggagccgccgtgctgcaagacgctgcacatcagcctgtttttcgacggtacgggtaataacctgaacaatgacctgctgctctctgacccgaagcacccgaccaatatcgcgcgtttgtttcgtgccaccattggcgacggcaccgccggcggcgtcactgataccaaaaagatgccactggatggggtaaaagacagtggaggaaaatacttcaagttttatattcccggcgtgggcaccccgttcccggaagtgaatgacccggactattccaccatgggtctggtgggggcagttaagggggaggagcggattaactgggcgctgctgcggattattgatgtgctaatgcgcctgagtaaggacaaggaaaacaatagcataaagctgtccgaaggagccagccgtgaatccctcaaaaaaatgggtaccagctggaaccggctgtggtttggcggcagccataaccgctatgaagagttcactcgtttgctgaatgatttggcctctgatttgaagcccctgattattcagcctgagccgggcaagccgaaactgacaggcatcaagctgtatgtctatggtttttcccgcggcgcggcagcggcgcgcacctttgtgcgctggctgagcgaactgctgccccctccggcggcggaaggtgaaaaaccgccgcagtgcctgcagacaggcgggatgcagctgcccgtcagcgtggagtttctcgggctgctggatacggtggcctccgtcggggtggcgcatgtggtgccggttgccgacgggcatatgtcctgggcagacggcacgatggagctgccggatgatgaaacctatggcgggctgataaaaaaatgtgttcacctggtctccgggcatgagcagcgtctctgctttccgctggactcggtgcgccgggcaaacggcaaatacccgccctgtgccactgaggtggtttacccggggatgcactcggatattggtggaggatatccgccgggggagcaggggaaagcgaatggtgaggatgacagcttattgctatctcagatagttttgcatgatttgtatgcttcagcgtttttggcaggtgctccattaaaaataccaatgatagtaattccagaaggtaaattggtagatgtatggcggataatgccaattgaacttgaagagttatttctcatttcaattgaattgatcaaacgcttcaacgcctggcgtgagcttaccctgggccaaaccacgccgaaaacgttcgatcccgatgcagcctctcactacgaaccacctgccgccggcggcagtctggaaaccgtcattgctgagcagatggcctggatcaccgcctggcgcatcgaccgctatgccagaggctcgatgctgaaaacgcccttctatcagcgcgccacgaataccgaagcgctgcctgccgcgcgtaaggcggcagaagagattcgtgataaagaacaggagaaggtgctcagggctcgccagaaccaaatagcaaaccagcctcctgacaggatggatgagctggttctgcagccgggcgtgaaggattttgacccaaagatggatcaaacccagctgttcgacgcggcgaaggagttcggaaaagattaccacgacggttaccgtatcccggataacctggcgcagctggtgctggataccgtgctgcagccggtgattttcattctgaataccgatgatgaagcgcaggaataccggcgcatgaagcgtgacggagaggcccgggtggccgtcctctttcccgatgccggggaagccagcaacgcggagcagcctgccggactggtgagggcgctgtttgatgatcaggtgcatgactcacgcgcctggtttatgtatgccgcgctcggcacgcgcgagatgtggaccggttacttccgctaccggatgatttacttcagcgagcgctgcagtaaaccgctctcgccgctggtgctcgccggagacctggtgggttttgcgaccgtgaccgcgggtgtcgtgctcagtttccggcaaaagcgcctgaccggcaagctggccgggctggctgcgacaggcgccgtgcgctcgctggaggtggcggtgctggacaagataaccggggaagcgctgccggagctgcccggaggggagcagctgcgggcatttacccacgagccgggaaccgttgtcgcacagcaaaaggcgcggaaagcggaagagcagctggcgcgggggcaagccgcgctgccggccagctggctggaggacgttctgacgacaacggtctgaacgcggaaaaagaggagccgatggacagggagagtccgatgaaatctgcattaatcagcccgctgctggcgggtctgctgctgttaaccggctgcgcgcagcctgccgcacaggccggaggcggcggtggtggaacaataaaagccatcaaccacacaaaatgggcaatcaaccacttcagtatcaacggccagtcgggcatcgattcaataggcccgtttcaggggggcggaggcggctgctgcttcagcgtgcccgcccgctggacgccgggtatgacggtgcgcgttgactgggaaagtggggaagcttcaactgatgatttcccgggatatgaaaactggaataaatatcttgaatgggaaaagaaaataaaagccagtcatcggcagcacagcaaaactgtcccgctgcccgactataacggccaggatgtgtgcggcattacggtgcactttttaccctgcgatgacgtgaaggtgaccaccagctgctggtcaccgagaaatgcgaactatccgataaaagagcccgtcaggatgaaggagcctgccgtctgtccgaagtagcccgccttcgtttattcaggatggcatcaccatcccttcattaccctcaaaccgacagggagagtccaatgaaatctgcattaatcagcccgctgctggcggggctgctgctgttaaccggctgcgcacagcctgccgcacaggccggaggcggcggtggcggaacaataaaagccatcaaccacaccaaatgggcaattaatcacttcagtatcaatggccagtcggggatcgacattttaggcccgtttcagggcggcggcggtggctgctgcttcagcgtgcccgcccgctggacgccgggtatgacggtgcgtgttgactgggaaaccggggtggggtactccatggactttccggggtatcaggatagggaaaaataccttgcctggaaaaaaggaattgatgcccaaaagaggcagcacagcaaaaccgttccgctgcctgactataacggccaggatgtgtgcggcattacggtgcactttttaccctgcgatgacgtgaaggtgaccaccagctgctggtcaccgagaaatgcgaactatccgataaaagagcccgtcaggatgaaggagcccgccgtatgtccgaagtagcacgccttcgtttccccggggtgacatcaccatcccttcattaccctcaaccgacagggagagtccgatgaaatctgcattaatcagcccgctgctggcgggtctgctgctgttaaccggctgcgcgcagcctgccgcacaggccggaggcggcggtggcggaacaataaaagccatcaaccacaccaaatgggcgatcaaccacttcagtgtcaacggccagtcgggcatcgattcaataggcccgtttcagggggcggaggcggctgctgcttcagcgtgcccgcccgctggacgccgggtatgacggtgcgcgttgaatgggaaaccgggcagggttcatccgcgggtttcccggggtttgctgatgaggcgaaataccttgcctggaaaaaagggattgatgcccaaaagaggcagcacagcaaaaccgttccgctgcccgactataacggccaggatgtgtgcggcattacggtgcactttttaccctgcgatgacgtgaaggtgaccaccagctgctggtcaccgagaaatgcgaactatccgataaaagagcccgtcaggatgaaggagcctgccgtctgtccgaagtagcccgccttcgtttattcaggatggcatcaccatcccttcattaccctcaaaccgacagggagagtccgatgaaatctgcattaatcagcccgctgctggcggggctgctgctgttaaccggctgcgcacagcctgccgcacaggccggaggcggcggtggcggaacaataaaagccatcaaccacacaaaatgggcgatcaaccacttcagtgtcaacggccagtcgggcatcgacattataggcccgtttcagggcggcggaggcggctgctgcttcagcgtgcccgcccgctggacgccgggtatgacggtgcgcgttgactgggaaaccggggtgggggatatggaaggatttcctggctttggcaatgatgaaaagtaccttgcctgggctaagaaaatgaaggcccagaaccggcagcacagcaaaaccgttccgctgcctgactataacagccaggatgtgtgcggcattacggtgcactttttaccctgcgatgacgtgaaggtgaccaccagctgctggtcaccgagaaatgcgaactacccgataaaagagcccgtcaggatgaaggagcccgccgtctgtccgaagtagcccgccttcgtttattcaggatggcatcaccttcacttaatcaccctcaaaccgacagggagagtccgatgaaatctgcattaatcagcccgctgctggcgggtctgctgctgttaaccggctgcgcacagcctgccgcacaggccggaggcggcggtggcggaacaataaaagccatcaaccacacaaaatgggcgatcaaccacttcagtatcaacggtcagtcgggcatcgacattataggtccgtttcagggtggcggtggcggctgctgcttcagcgtgcccgcccgctggacgccgggtatgacggtgcgcgttgactgggaaagtggtgaggcatcgactgaaggttttcctggatttgctgattcaaaaaaatacagagagtggagagataatttaaaacaaaacaaccgtcagcacagtaaaaccgtcccgctacccgactataacggccaggatgtgtgcggcattacggtacactttttaccctgcgatgacgtgaaggtgaccaccagctgctggtcaccgagaaatgcgaactatccgataaaagagcccgtcaggatgaaggagcccgccgtatgtccgaaataaccgaaattcatgccgcctgggtcccgccgccgtttccgccgcagggacgtctgccgggccgggcgctgcaggttgggcagaactgccatcagcagaacagcgacgagcggcgctatcaccaggaactgtgcctggctgccggacggcgcgtggagccgccgtgctgcaagacgctgcatatcagcctgtttttcgacggtaccggcaataacttaaatcatgacttttttatcgcgaagccgaaacatccgaccaatatcgcccggctgtttcgggcgactattggaacgggaacggctggcggggtgccgtctgacgatcagagcaagttgtttgatgatgacggcgggggagacgggaaatattttaaattctatatgcccggcgtgggcaccccgttcccggaagtgaatgacccggactattccaccatgggtctggtgggggcagtcaagggggaggatcggattaactgggcgctgctgcgcataatcgatgtgctgatgtttagtgccaccgaaaaatggctgaccaccacagagagtcgtcgttcactgaaagaaatgagcaccagctggaaccggctgtggtttggcggcagccataaccgctatgaagagttcactcgcttgctgaatggtcttgccccgaaactgatgccgatgctgattcagcctgaaccgggcaagccgaaactgacaggcatcaagctgtatgtctatggtttttcccgcggcgcggcagcggcgcgcacctttgtgcgctggctgagcgaactgctgccccctccggcggcggagggtgaaaaaccgccgcagtgcctgcagacaggcgggatgcagctgcccgtcagcgtggagtttctcggactgctggatacggtggcctccgtcggggtggcgcatgtggtgccggttgccgacgggcatatgtcctgggcagacggcacgatggagctgccggatgatgaaacctatggcgggctgataaaaaaatgtgttcacctggtctccgggcatgagcagcgtctctgctttccgctggactcggtgcggcgggcaaacggcaaatacccgccctgtgccagagaggtggtttacccggggatgcactcggatattggtggaggatatccaccgggggatcaagggaaagcgaatggtaaagatgatgcattattgctgtcgcagattcctttgaacgatatatataccgctgcttttagcgcaggggctccattaaaagtaccacaggatacgctgccagagttttttaaaaatgatgcctggagaaaaatgccattagatttgttagatgcgttttttgttgatgaggctctggtcaaccgcttcaacgcctggcgcgaactcaccctgggccaaaccacgccgaaaacgttcgatcccgaagcagcctctcactacgaaccacctgccgccggcggcagtctggaaaccgtcattgctgagcagatggcctggatcaccgcctggcgcatcgaccgctatgccagaggctcgatgctgaaaacgcccttctatcagcgcgccacgaataccgaagcgctgcctgccgcgcgtaaggcggcagaagtgattcgtgataaagaacaggagaaggtgctcagtgctcgccagaaccagatagcaaaccagcctcctgacaggatggatgagctggttctgcagccgggcgtgaaggattttgacccaaagatggatcaaacccagctgttcgacgcggcgaaggagttcggaaaggattaccacgacggttaccgtatcccggataacctggcgcagctggtgctggataccgtgctgcagccggttattttcgttctcaataccgatgatgaagcgcaggaataccggcgcatgaagcgtgacggagaggcccgggtggccgtcctgttcccagaggccggggaggccagcaacgcggagcagcctgccgggctggtgagggcgctgtttgatgaccagatacatgactcacgcgcctggtttatgtatgccgcgctcggcacgcgcgagatgtggaccggctacttccgctaccggatgatttacttcagcgagcgctgcagtaaaccgctctcgccgctggtgctcgccggagacctggtgggttttgcgaccgtgaccgcgggtgtcgtgctcagtttccggcaaaagcgcctgaccggcaagctggccgggctggctgcgacaggcgccgtgcgctcgctggaggtggcggtgctggacaagataaccggggaagcgctgccggagctgcccggaggggcgcagctgcgggcatttacccacgagccgggaaccgttgtcgcacagcaaaaggcgcggaaagcggaagagcagctggcgcgggggcaagccgcgctgccggccagctggctggaggacgttctgacgacaacggtctgaacgcggataaggaggatccgatgaataaagtcattcgcaaaggcgataccctgcgggagtatgggggcagggtgctgatggggcattatcagtgttttggtctgggattcgcctgcaagggcgacccggtcaagtgtaacaaacacggtatgacgaccattgctgaaggcagcgcacgaaccacgattgatggccagccggttgcgctgcacggtcatcgctgcgcctgcggctgcacgctggtcagctctaacccagactgcggggttgatcagtgaggccggtaccggagtatcccccgtacggagacgcgcgaccgcctggtacggccaggtggctatcggcttcggccctgctggtcctgcttagcggcggggtcagcgctttacttgcctcgtcagaagggaaaagcgccctggccgccaccgggatcctgttggctctggtgctggcaggtaccggctggttgatccggctgctgtactaccgcatgagcgtgcataacgccaggttctatgaccaactggtggcatacgaacaacagcaatggtgggcggagcatcggcagccgatcgggttacaggaaggtctgttgctggggcccatgggcaaaacgaccactgactggctgcgggtgctaagccgtcaccagcgtccgccagaggaagagaacgagggcggcggcagggcgctgcgagcgccatacctttcagtttctgaggctatcgcccgcgaaaaacggctggcggaactactggtgatggaatggcaacgacagcgcagtgaaagaacgcttacgccgccgctgcgttgctactggcagggaacggagctcgcctggcaggcgtttcgtgcacagatgaccctcactgttgcgcagatgacactaccctcacgcccgtatgcctggcgtggggaggccagcctcgcggagatagcacacgctctggcggaagctgacccccatgacactgtgcttatcgccggatgtcaggtggttgtcgcccagacgggggcggtgcaacccgccggagagtctgcggtactgtggctcgccggacgagacggtccggtgcacctgaccaggggggaaatatattgcgcagaaaaaggggaggccctgactgctgtagccgctcgtgtgctggagcagaacgaactgagcggccccccggaagcctgtgcgctgttttttcagccggggctggaagcgctggcgcacagcggttgggatatcaacctgtatcgccaggatgcctgttggggagacatcggcgagatggaaggcttgaccgtcctgtcgctggcggcgatctacgccgcgcactaccaacaaccgtgtggctggctagcccgcgatcccttgaataccctcgcaattggaattgtaaaacctgatggacaacgtcaataaacctgcagctatctctgtggcggctacggttatcgtctgtattgctgcggtcacgcttctggtgctcctgggcgggctggcatggtggctatgggcgatggatcgtgccacgcagtgggaaacgctgcgcccgcttatcgccacgggctttattatctgggggatggcactcagcctgctggtactggggtttatggcctttcgactgctgataaaagataaggttaagccttcagcagcgcctgtgcggcaacccaccaggcccgccgggcgcgaagccctttatgccccgctgaaaaagcaccttcacgcacgttaccgcctgcgctggcggcgcaaagtccgcctgctgctggttaccggcgacgaggcagaaatcgaacaactggcgcctggtctgcgtcagcagcagtggcttgaaggtaaccgcactgtgctgatttacggcggtaacctgatcacagagcccgaccaagaaaaatacgccgcgctgcgcaagctgcgccgtggccgtcctctggacgggattgtgcgggtgatgccgtcgtctctgaccctgacgccgcagataagcgagagcgacctgcacgggctggaaaaaatcagcgaactgctgggctatgccgccccggtctggttatggaaactgtgcgacagtgagtggccgcaggctgaccgcgcggtgcaggcggtaggggttagcttcccgttgcgcgccactgaggaagatgtcgcccgtcagcttgcgcagatgttgcccacgctacgggagcaggggatgcaccagatcgcagcagatacccgccacgactttctgctgcgtctggggcagcagcttatcgacggggggatcgcgcaatggcgctggcagctggcgccgtggctgaccgcctcgcggcagcggcttgcgctgcgaggcctgatgtttagcctgccagagcctcgtaccgtagatccgtatcaggaggcggatacctcgcctgcgggccagcctcatctcctgacgctgcccgccacctggctggggatcgtcgatgactgccgccgtttacgcgggcatcacgtgggaatggcgtgggagcggggcctggcgtgcggtctgctggccatcctcggcctgtgggcggcgggactgctgctctcctttgccctcaattacagtcagattgcttcggtagcgggaaaagcccgcgacctggtggcccacccctccgtttttgactatcaactgacggccctccatgccctgcgcaatgaggccggccgtctcgtgcacgatgggcagaagggagcgccctggtatcggcgctttggtctggaccatcatcagcaactattaaacgccgtcctaccctggtacggtgtggcaaatcatcgcctgatacgtgacccggccaatgccgcgttgcagcaggcgctcagcgcgctggtcaactccgcccccaatagcgaccaacgagccaggctggcgaaaccgggctatgaccagctgaaagcctggctgatgatggctcgtccggataaagccgatggcgcattttttgcgcagaccatgaaaacggtccagccgacgcgaatggggatctcgaccggtctgtggcaaagtctggcgccggatttgtgggccttttatctctccctgctgcccgagcggccagagtggaagatcatcccggatgcgcaacgggtgagtcagagccgtcaggttctgttgcagcagctaggtcgccgcaatgccgaaagcaccttatatgagaacatgctcaaatccgtgcgtcgtaattttgccgatgtgtcgctggaagacatgaccagtggcaccgacgcgcgccgcctgtttaccaccgatgaagtggtcccggggatgtttacccgccaggcatgggaaggcggcattcagcaggccattgataaggcagccagctcgcgccgggaggaaatcgactgggtgctgagcgattcgcgcaaaacggtgtcgacagacctgtcgccggaggcgctgaaagcgcgtctgacccgacgctacttcaccgatttcgccggcagctggctgaattttctcaacagcctgcgactcaacccggcgaccaccattgccgatgttaccgaccagctcacgctgataagcgatgtccgccagtcgccgctgattgccctgatgaatacccttgcctggcaggggcaggcggggcaacaaagggaggggctgtcggacagccttattaaatcggccaaagatctggtgggcgggaaagacaagccggtcatcgaccagtcggcagccggcccgcaggggcctctggatgacacgttcggcccactgctccagctgatggggaaaaacacgggcagcaacgtcatgtcggccgatagcaccctgagcctgcaaacctatctgacccgtatcacccgcgtgcgcctgcgcctgcagcaggttgcgaatgcctccgatccgcaggaaatgatgcaggtcctggcgcagaccgtcttccaggggaaaagcgtcgacctgaccgacacgcaacagtacggtagcctgatttcggcaagccttggcgaagagtggagtggcttcggtaatactctgtttgtgcagccgctgactcaggcctgggaaaccgtgcttctgccgtcggcggccagtctgaatgataaatggcgccgctcggtggtcgccaactggcacaccgcctttgacggacgctttccgtttgccgccagcaaaagcgatgcctccctgccgatgctggctgagtttgtgcgcaaagacagcgggcgaatcgaacgttttctcacgacggagctgaacggtgtcctgcataaagaaggcagtcaatgggtgccggataaggtcaacagtcacggcctggtctttaatccggcctttctgcgcgcgatcaaccagctaagccagctgtccgacattcttttcaccgacggcagccaggggatcagctttgagttacaggccaggcctgccccggaggttgtcgagacacagctgacgatagacggccaaaagctgcgctatttcaatcaaatggccgactggcagactttccgctggccgggggagacgtataaacccggcactctgcttacctggaccaccgtcaatgcgggcacgcgcctgttcggtgactacagcggtacctggggttttattcgctggctggagcagggtaaacgccatccgctggatcgcagccagtggatgatgagcttctccgccccggatggccgcactctgcagtgggtattgcgctcccagcttgggagcggcccgctggcgcttctggcgctgcgcggattgaccctgccggatcagatttttactgtcgatgcggctgagagcgcacaggtcctgacgacgggggtagggaatagtgacatggatgagatggaattatgagtattttacaaaatttggttgccgccagtcagttggatgaaagcgtactgcgccagcaggcccggtcacgtcaggcgcagtggcagtcctggcttgcgccaatcagtgacgcccaaccaaccggggacgatccgggctatgacgatgattttcagcgtatccgcgatgaggtcaataagatctccggcgtcgataccgaactgatttgccagctggcagaaaaactgctgactcagacctgcaaggatctgcgcgtgatcaccttttacgtgtgggcgcgtctgcagcgggatggtgaaaccggtctggcggagggcgttacgctgctggcggcaatgcttgagcggtttggggctatgctccatccacagcgtgaacgtagctgtaaatcagcgctggaatggcttggcagtcgccggatgtcggacagcctgtctctttatccggaagtcgacatgaccactatgcaggtcattatcggggcgttattgctggcggaagccactttttccggcttggctgaagcatctcgccccgatctttccgggctatatcagatactggagaaccgcctggtgcaaagcggcggagcccacagtctggtgccgcagaccagccgcgaagaacacgatctgctaccccaacatacggacaccgcaccggtaatgcataccgtcacgtcaggtcgtgatttgctcgatcaggctaaggtgctggcgaaatatctgcgtgagtgtcccggcggatggctggcaggtcatcatctgatgaagagtgtgcgttgggatacgttaacggagttaccgccgctggatgcctccggccggacacggctattgcctcccaagcctgagagtaaagcccatcttaagcgtttgtatttacagaaaagctggtcggaactgctggagcatacggacacgctgttggcgcaaggcgtcaaccatctgtggctggatgtgcagtggtacgcctggcaggcgttgctgaaactggatgctgacagtgtacgggccgatatcctgtgccgggatatgaaagggctgctggctcgtctgccggggctggaaaccctggcgtttaacgatggtacgccattcgccgatgaagtgacgctcaactggcttaacgaacgtgtcctggatgagatggccggatggcaagatgagccggtaatggcggcgaccagcgctgatgaggtgctgtcgctggagccagaagtgctcacccgcgcggacgatgaaggtattgagtcggcgctgaactggttacaggcgcagccgggctataccaccagccgcaatcggtggctgatgcgcttactgatggcgcgggtcagcgagcagtacggaaaaaatgaaatggcgctgcatctgctggcggaactcgacagccgcgcccgggaaatgacgctcgaacaatggaagccggagcttatctttgaggtcaaagcccgccgactccggctgctcagaggcaaggccgggcgcagtgaggcagaaaaaaatcgcttgctgccagaaatggagtcattgcttgccgggctcatcgctctggatcctgctcgcgccgcggtgctgtgcgcataattcacgcatcattcacattgcactccctgcacctgcggttctctgcatatctgaaagctattactcatactggtgatttatggacgatttaaccttgcgttattacgacgctgaaatgcgctacctgctggaagcgggtgaagagtttgcccgcgctcatcctgagcaggcggcaatgctcaatctcgacaaagcgggcgctcgcgacccctttgtcgagcgtctgtttgaaggttttgccttcctgatgggccgcatgcgcgagaaactcgatgacgatctgcctgagctgaccgaaggcgtggtcagtctgctgtggccacattatttacgtaccattccctcgatgtcggtcgtggagttcacccccgactggtcggaaatgaaagagccgatgacgatggccaaaggctttgaagtgctttcccggccgatcggtgaaaagggcacgcgctgccggtacaccaccaccaaagcgatcgctctgcagccgttatccctggaacgcgtccagctggccaccgatacggatggccgttcggtgatcacgctgcgctttacctgcagccagctgacggactggcgccgggtcgatctcagtcatatcccgctgtactgcaacgccgatgcgccgctggcctgcgccatgcacgaggcctttaccctcaatgtggcccggatgtggctgcgcatccccgatgaggtggacagaaggccgctggacgggtatttcagcgcgctgggatttggcgaggatgacggcctctggcctgaagatggccgcagttttcgcggttaccagctgctgctggagtattttaccttccgcgaaaagttcatgttcatcgatctgcgcgggctggagacggtggtttttccggccggactggcgtggtttgaaatcgacgtcgtgctggcggaacgctgggaacatgacttccgcttcagcgaaaagcacctgcgcctgcactgcgtgccagtgatcaacctgtttccgctggagtccgatccgctgaccatcaattccctgcagaccgaatacccgctgcgcccgatgcgcgtgcaggacggccacaccgaaatttacaccgtcgattccgtgatctcctcacaccagcaggtttacgcgccgttctcaagttttcgccacaaaggcggcatgatgcgtcatgacgcggcggactattactatcatacccgggtgcgccgtggcccctccgggctgtacaacacctggcttatcgtcggcggagaagcctttgataatcataccgtaccggaagatgaaagcctgtcgctgaccctcaccggaaccaacggccagctgccgcgtcgcgcgctgcagagcaccgtgctcgatacggtgatgaaaaccacttccgccagtattgcagtgcggaacctctgcgcgccgacgctgccgtgctatccccccgcccaggaccgttttcactggcgggtgctgagccatctgggcagcagttttctttccctgatggataacgcggaggtcctgcgcggcaccctggcgctgtatgaatggaccgacagcgagatgaatcgtcggcgtctggaagccatcctcgacgtgaagcaccgcgcaacagagcgctttgcacagggccatctggtgcgcggcgtgcagattgaagtcaccctcgacagtcacggctttgccggacgtggcgatatatgcctgtttggcgagatgcttagccgcttcttcgcgctctacaccgacatctacttgttcaaccgcctgattatcattctgcaaccaaccggagaacgactggaatgggaagagaagcacagccgccgcattcccggctgaccccgcggctggaggccgacctgccgcggatcaatttttaccgcttctgccagcttctggaaaaacggcgtcccggccaaccgctgatggggggaaccagccatccggctgacgatccggtgcgtttttacccgcatccgggaatgggatttcccgccagcgaactgaaagccgtggaatacgatgaggccgatgacagcaggccgccggtcatccgcaccacctttatggggttgtacggtgtcgattcgccgctcccgacggcatatctcgatgatatcgcccagcacagggaagggcatgaagcgctgcagggcttactggatatcttcagccatcggatcatgacgcagttttaccgcatctggcggaaatactcctggcccgccacctttgagcccggcggcaccgatcgtctctcgcagtcgctactgggcctggcggggctgggcatccccggcacgacgcagcatatcgcctcgccggcgtcgcgctttctggcgctaaccggcgtgctgcgtcagccgggcaaaacccagcaggggatccaggcgctggtcaccctgctggccccggagaccaccgtcagggtgagcccgtacagcctgcgtccggtggcgatcagccagccgctggggttttacggcgatgacgacttcttcctggacggcaatacgccgctgggtgacgaagcgatggatgccagcagccagctcctcgttgcccttaccaccgacaatcccgcggaggcgcagggctggaagcctgacggcccgctgtttcgggactttctcatcctgctgcgggtatacctcggctggcgattccgggccaacatcaccctgaccgcgccgacccgactgctggctgtcccgccgcttggggacgagccgttctggctcggtatgaacggcgtgctgggcgtgggtgagggcgagagtgaggacgatattcctcagacctttaccaccgagctgggtacctatacgggcctgcagcctgccacctttctacaaggaaaccgacgtgttacgtataagtttgactaaaaccgcctgtctgctgcccctgcttgcgctttgcctgagcggatgcggactcacccagcgcgtctcggagggaacaaagtctgccttcaacgccgttttttataagaaaattaatacgctgcatctggactttaccgcgcgcgaagcgctcaacaccgatgccagagagaatcactcgctctctgaaccggtggtggtgcgcatctatcagcttaaagatcgccagacctttgaccggctggtttaccagcagctgctggaggagggggatattctgctcgccgccgatctcctcgccagtcgcgatgtggtgatcggtcccggaggggacgccagtctcaatatgccgctggaagcggaggcgacgttcgtggcggttgtcggcctgttccgccatccggacacacaaagaaatacctggaagcaggtgctggcgcgtgaggaattggatccggacaagccgcgcattttcaccgccgaacacaaccagctacggctcaggcctgaagcggcgaagtaacgtaaaaaaaaacaaacatttgcggcggggccatcgcgccagttcgccctcaatcttcgtaaccagcgaacgggcgataaccatcttgatccagccccagcggcttcaccacagcacagggagataacgtgacagcgagggaacgtttttttaagaaactgcagcaacagcaaaatccgcggcggacagcggccctcgacgggtcggccgccgcggatatcgccaggtttcgtcagcagatggcggagctggctcagcagataagtcagtggtttgatggaaccggtattgaggtggtgatttcgacccgccatctccacgacctgagtacccttggctacagcctcaacagcggcatctgccgctacgatatcccggccattcgtctgcaaaacggcgagcgcagcgtcaatatcgtgccgcagcagctgttggatggcgtggaaaaggggatcgtgaccctgagtcttgaggcgcccgacggcgcgggatcccgggaggtgttttatctgagcctggccccggaggagggctggatgatccgcaaggcgcaccagtccccggaagcgcggcttatgcttaccgaagatcgcttttttatggcggtcgacagcctggcctgaagatccctgacaggcgatgacgtccccgcggcggcggtgcaaagcgcgcatcgccgccctgaggtatcaggcgccaaacgctccgtcgatggtgtgcatggcgccagtgacaaacgatgcctccggaccggccagccacgccaccattcccgccacctcttccggacggccatggcgcttaatggccataaagctgtgcatcagctctttcatcgggccgttctccgggttggcgtcggtatcaattgggccgggctggacgacgttgaccgtgatgccgcgcgggccaaaatcccgcgccaggccgcgcgccagcccctgcagggccgatttgctgagcgcataggccgccattcccggcactggcatgcgatcgccattgaccgagccgatgacaataatacgcccgccttccggcatgcggcgcgccgcttcgacggaggcatggtagggggcatgaatattgatgcggaacaggcgatcgatggcatcgctgtcctgctcgagagcgtcaccgaaaagcgcgatcccggcattgaccactaacacgtccagcgggccgctgtcgcggaccaggcttatcaccgcatcgcgatcggcgctgtccgcctgcaccgccgtgctgccggtctctgccgccagccgctcggccgcttgcggcgaaccggaatagctaaacaccaccgacgcgccatcggcgacaaaacgcctgacgatcgccgcgccaattccccgactcccgcctaaaaccagcactgatttgttgtgaaacgctgtcatatcccgcacctcatgatattgtagtgatgattacaatatgctgcggctaaacaagctgtcaaggattaatatagtgaccactacaaaacaagggcgtactccgggacgtccccgccagtttgatgcggaacaggccattgaaacggcgcaacgcctcttccacgcgcgaggctacgacgcggtgagcgtggccgatctgacccaggctttcggcatcaaccccccgagcttttatgccgcttttggcagtaagctcgggctgtatacccgcgtcctgcagcgctacagccagaccggggccattcccatcgatgccctgctgcgagacgaccagccggtggcggcgtcgctcatcgccgtactgcaggaggcggctcgccgctatgtggccgatccggccgccgccggctgcctggtgctggagggggtacattgtcaggatgctgatgcccgggtggcggcaggcgaatggcatgctgcggcaagagccaaaatccagcagtatatcgcccgccatcgcccgcaggacgcgctgcgggtgactgactatatggatacgttgatgcttggcctgtcggcgaaagcgcgggaaggggatagtctgccgcgtcttctggagaccgtgcggctggcaggcctggcgctggagcgcatcctgccagcctgagtcgtcagatggtttgtccgcccgacacctcgatccgctgggcggtcacccagcggttatcgtcgcgtagcaggctggcgatcatcggcccaatatcctcgggaacgcccacccgtcccagcgccgtcatggcggcaaactgcgcgtttacctctgcgtcgtcccgcaccagcccaccgccaaaatcggtggcgatagcgccgggggcgatggtattgacggtgatgccgcgcccgcccagctcgcgggccatgtacacgctcagcatctccacagccgctttggcggcggcgtaggcggagaagccaggataggagacgcgggtcagcccggaggaaaagttaacgatccgcccgccgtctgccagcagcggcagcagggtttgtacgaggaaaaatacccccttaacgtggacgttaaacagcccgtcgaactgcgcttcgcgcgtttcggccagcggggcgaattcgccgtgccctgcgttattgatcaggtggtcgaaagtggcccgcccccagacgctggccagcgcgctgccgaggctgtcggcgaaggccgggaagctggcggtttgcgccatatccagcggcagggcgatggccttgcggcccagggcgcggatgtcggcgaccaccgcttccgcctgttcgagactgccgcggtaggtgacgatgacatccccaccctggcgggcgatatccagtgcggtctgacggccaaggccgcggttggcgccggtaataagtgcaatcttagtcatgttcggtcctctctggtatgtggagtccttacaataggagaggctcaccgggccgggttgcccaatccttgttattttttgcccatttctctccgttcactcccttttgccgggaaatagcgcatactcaggctttaaaacttgcctgaaaggatcttatgcgcgacgctctgttcgatctctgccgccggtttgccgatgctcatgtcgatagcagcggggtggcagttaccccggttcccggtattactctggtgcgggccctgcatcctggtgacctgcaggcggctatcgccaggccgctggtggccatgctgctccaggggcgtaagagcgtgaccaccggcctggcaagctttgactatggtccgggcgaggcgatggtgatcgccgcggatgttcccactaccagccagatcaccgaggccagtcagcgttttccctattacgcgctggtgctggagctggacctggctatcctgcgcgagctgcaggaggccgggccgtcagggccggatgaggcgccccgcgttggtatcgaaccgatgaacgccgatgtgacggatgccgcttaccggctggcaaggctgtttgatcaaccgggggcgctggcggtgctgggggaaggtctgcggcgggagctgcattactggctgttgcagagtgtccatgggccggccatccgggcgctgggcgccgtagacagccattcggcgcggatccgccgggcggtggcgatgctgcgccgggattttatgcagccagtcagcgtcgacgcgctggccgacgccgccgggatgagcgtctctgtctttcaccgtcatttccgcgccatgaccacgctgtcgccgctgcagtttcagaagcagttacgcctgatccacgcccgccgcctgatgctggcggaagggatgagtattgcacaggctgccggggaggtgggctatatcagcgtgtcgcagttcacccgggaatacgctcgcctgtatggcgcgccgccgggccgcgatcgtcgacgggaaaaaatgagcgcctgacctggcgcgcgggctgccggcagctcatccctgagcctgacgccggtggtttagtccgcgattttcgccgtgatatgcgctttgttgcccattcgcgcttcagtgatgcgataggtagtcacgccctcgcgggcggcatgctggcggattttgctctccgcgtggtccagggtatcgccggtggcggtgatggttctggcatttgccgccaggggcagcagacaactcaatacgatcagtggaattaacttgttcatcgtcattctgtcctgtgagagaaaatcagcgcgcggtctgcagccagccggcaatgtcctgggtcggcagctggtggcgggcattccaggtgtcgcccatcggccaccacacgccatccccccgggcgaaggcggcgcgatagcgcagcatggcgtcatccgggtttgtccgcagctgctccagcagggcgggcagggtgtggacggctttgctgaacgtctgctgcgttacgcgctccacggtatccgccaactgtcggtaagaggtcgtttcgccggcaacaaacaccacctcgttgacgatccgcggctgatgcagataaatcgccgtggtcaggcggccaatatccgccggtgaggtgacggtcacctgggtatcccagctgccaagggcgtgaagggttcggttggataaattcactacatcgaagtctggttcgaagagaaagctggtaaacatcccggtggagacaatgacccactccgtggcccgctgcgcgcgcagcaggggccggacatcgtactgctcgtcccagaccggctgaccgctgcctttgcctaccacatcgtaattgacgccaaactgccagggaaaatagcggggtaccccggccgccagcaccgcgcgggtaattttcagctgtgtccccggaccggcgacaaaccccatgcagttaatcacggtggtgaatccgcgaaactgatcggccagcgtctccatggcgctaccggcgatgtcgacggcgaggaaggtggctccggcgtcggccagcgcctgatggtttgccgaccgcagctggccggcttcatcccaggccgccggcgagacgatgaccgagaccgtgccctggcgctcgattaccgcaggcaccagcgcatcgagaacggcggcgcccagttgtcccgctcccagcaccaataccttttccgcatgattaaaattatcagttttcattttaactccttgctcagttaagccttgtgttgacgggctacaggctcagtgtagggggacggtcgacattcgataagtacagcgtttcgggttagactgttcgtaatattgggataatgagcgccgggggggtaacgaaatggataaactggatgccatgcaggtctatgttgcggtcgtggatgcccacagcttcgcccgcgcggcggaggtgctcgggcagccgcgctccacggtatcgcgggtggtgaaggagctggaagcctggctcggggcgcagcttctccagcgcaccacccgcaagctcagcgtgacggcggagggtcgccggtattatgaggagtgtaaaaggctgctggccgagatggcggcgatggaagcctcctttcccgggcgctcggctcagcccgccgggcggttcaaggtagggatgccgcaatcccttgcccgccactgcattctgccgaggatcggcgagtttttgcagcagtatcccgacctggagctgatcctctgctcaagcgacaacgtggaagatattattcaggagggattcgactgcgtgatccgtaccgggcggatcgaagattccaccaccctggtggcgcgtcctctggcccgctaccgctggatggtcctcgcctcgccggcctggctcgcggcccacggccggccgcagagcatcgacgaactgcaccagcatcgggcggtgggctacctgaatcaccgtaccgggcggaccatcgactggcttttctccctcgatgaaggcgactacgcgatccgcatgcgggagacgctggtggtcgacgataccgatgcctacattcaggccggcattcaggggctgggcctgatccgcgtcgccagctatctggcgcaaccttatctgcagagcggggcgctggtcgcctgtctggagcaggccgcttctgatcttcccttgtcgctggtctatccgcaaaaccgctatctgccgccggcggtgcgcgcgttttatgactggagcaggcgcgtgctgcaacccccgcacagcgaggcctgatgccggggcatcggcccggttattggccgcgcatggcctgttttaacttcgtcaccagccagttcagcgccggatcctgcgcccgccgtttgtgccgcaaaatgcacagcgtaaattccggatacgctaccggcggagcgtccgcgcgcagcgcatactgcgcctgccagcgctgcgccagcccctgcgggacggtggcgaacagcggcagggtggtcagcagcaggggaaaggtggagaaattctgcgtggcaaagcgcacgcgccgcgcgagtccctggctggcgagctggcggtcaatttcaccgtggccggtttcgcgataggccaccatcacgtgttcccaggcgacaaagtcgctcaccgacagcggcccgcggcaggggatctgctgcggcgaccacagggtggtgactcccatggtcatcactggctcgctgaccacctccccgcggctctgtttgttgacagacaccgcgacatcaatgcgctcctcctccagcaactggcgaacctggaaggggtcggcggctatcgactgcagtgacactccgggcgcctcctgcatcagcccgggtaacagcgggggcatcagccagtgttcgctccagtcgctgaggccgatgcgaaaaagctgctgcgcgcgcgccgggacgaactctccggcgccaaacatcgccgaatgaaggttttccatcagcggctgcaggtcggtcatcagcgcttgcgcccgcggcgtcggcagcatgcctctggcgctgcgcacgaacagcgggtcgtcaaacatctcgcgcagccgtttcagcgccccgctgatagccggctggccaagatgcagtacctctgcggtgcgggtgacgctcccttcgcggtacagcaccatcaagactgtcaacagattcagatcgatacgactaaaatcattttcaatgattttgttcattatgataatcaatttgaatgtgggttatcccggcagcatagtgaatatcaccccgataaatcaaccagcgcaatgcgcgcggagggagtgatgcaaacttaccagacaggcgatagcctgattttcaaagtgccggagcgcgagatttccctgcagccggcagcgctctatccagaggcgttcccggtagcggaggcggaggccgttattcagccgattgcgctgtcaatccacagctgggtggtgcagaccccccacgatctgattgttatcgataccgccaccggcaatggtcgggagcgcggcggcaatccgctctatcatcaacttaacacgccgtatctggagaatctccgcgccgcgggggtgaacccggaggacgtgaccctggtgctactgactcacctgcataccgaccatgtcggatggaataccgtctggcaggacgatcgctgggtgccgctgtttcccaacgcccgctatctgtgctcggcaaaagagctgtcgcgggtgaaaaacagcgaacgctaccgggcgctgtggcttgacagcctgctgccggtgattgaggccggccagctggagaccgtcgatgtggcgacccggccgcgggtcggcggacggatcgactttattcccacccccggccacagtccggaccatgccgcgctggtcctcgccgccggagatgactacgcctgtttctccggcgatcttctgcattccccgatccagtttgcccatccgcagtggaattcagcgttctgcggcgatccccggcaggcggaagtctcgcgacgggagatgatggcgtggggggcaagccatcatgctcaatggttcaccgggcattttgccgggccttcctgcggctggctggagaaggataagcaaggtgactatcgctggcgagaggccgggaaacaggctgcagataagggagaagagtgatgaataatgcgcaaagcgtgttggtctttggcgccaccggtcagcagggcggctcggtggcgcgggcgctgctgcaccgcggctggcgggttcgggcgctggtcagggatcctttctccgccggggccgctgcgctggcggcgcggggagccgagctggtcgtgggaacctttgaagaccgggcggcaatgcggtcggcgatggccggggtcgacggcgtcttcagcgtccagcccagttcgccgggagggacggtgaccgatgagcaggaggtacgctacgggataaccatcgccgatctcgccgtcgagtgcggggtgaagcatctggtgtacagctccggcagcgcgacgggggagacgccgaccggcgtagcgcattatgacaccaaagcggaaattgaacggcatattcgccgcctgccgctggcggcgaccatcgtgcggcccgccacctttatggagctgctggtgatgcctggttttggccttgatgaaggtcgttttcaattttttatgttgccggaggggagaatgcaggtgctggcggtggaggatatcggccatcttgtcgcggcggtttttgccgcgccggcgcggtttgccggcaagacgttcgagatcgccagcgacagcgtgaccggtcgtcagctggaggtgttattctccgcggcggcgggacggccgatcccctattcgcgattttccgacgaggtgctggccgccagtccttttctgcacaagctgaccgggctggtggacgacgggcggctggccgggcacgccgacctcgacgccctgcgccagctgcacccgcagctgtacaccttcgccggctggctggcaggccccggccgtcccgccttcgagcgggcgctgaccagcggggctcgctgggcgtttgatcgttaaaggctggtgttctggttacccgccaggcgcgctgtctcgtcggtgaccggccgccgctagccggcagtcaggatcgcgtcggccagcaccgctaaaatccgctctgcgcgcggggcatgggacggttgctcccgcagccaggcaagcgcggcgatcagatcgaacagctcctctccgctgagatctggccgtgccagcccggcctgctgcgcgcgggtaagcagcgacgtaccggcggcgcgcagggcaacgcaggcgctgtgcagggcggactcaggattgtcgatggcgctcatcagcggggcgatgatcccgcgatgctgatgggtaaacgccacgctctcggccagccactccagcagcgccgcggcaggatcggcggcgagcagaagcgactcagcccgggcggttagcgccgcaaagcggctgcggagcagggcttccagcaggctgtcgcggttgggaaagtggcgatagagggttcccattccgacgcccgcccggcgggcgatatcgcgcagcgacgcctcggcgccctgctccacaaagacgtcccgggccacctcgatcaacaggtcataattttttctggcatcagctctcattggcgttccttgacaatcggagcactgctccatatattcggaacagtgctccgttaaatataacgcatttccatatgaggagaaagcgatgtcgacgcagatgatgaaggctgttcaacagcactcctttggcgggccggaagtcctgagctatgaggatgcgcccatgccggtcctgcaggccggtgaagtactggtacaggtgcacgcggtgggcgtgaacccgccggacagctatctgcgcgatggctatcaacagctgcccccggagtggcggcccgaggtccgctttcccttgatcctcgggaccgatctctccggggtggtggtggcgcgggcggatgacgtccgggaggtggcggtcggcgacgaagtgtatgctatggcgcgttttcccgaaggggcggcagggggcagccgcgcttacgccgagtacgttagcgtgccggtcagcgacctcgctcgcaaacccctaaccctgagccatcagcaggccgccgcggtgccgatgtcgctcctcaccgcctggcagttcatgatcgatcccgggcatgaggtggcgaatccgctgcagccggggccgcatcggccggtgccgctggcgggtaaacgcgtcctggtcaacggtgcggcagggggagtcggtcatttcgccgtgcagctggcaaagtggcagggcgccgaggtgattgccgtcgccgcgggccgccatgaagcctttttacgtcagctcggcgccgatagcgttatcgactatacaaccaccgcagtggaagagacggtgcgtgacctggacctggttattgatgcgccgggcgggccggccagcggccgttttttgcgtaccctgcaacccggcggcgcgctgtacccgatctttccgctcggctttgccggggcggaagaggcgcgacagcgcggagtgacggtctccaccacccaggtacgctccagcggcgcgcagctcgcccggcttgccgacctgctggacgtcggggtcatccaggttgcaattgacagcgttttccccattgcgcaggcgcagatggcgcatgagcgagcagcgcaggggcatcttgagggcaaaatcgtgctgtcggtgatggactcgtcagccgggtaatccccgacggccagggttgcgtttttgcttctccctgcggcggactaaaacagcgccagccgggcaagacggtccagcgcgttgctcagcgcctcgtcccctgcggtcaggctgatgcgaataaatccttctccccctgcgccaaaacccgtgcccggcgccaccagaatatgcgcttcctgcagcagcaggcgggcaaactcctgcgaacggtagccgggcggcacgccgagccagaggaagaaagtgccttgtgcgtcacgcgccggccagcgcagcgcagccagtcgacgcagaacccactcccgacgttgatgatagaccgccgtcagctgcgcaatccgttcggccggcaggttgagcgcggcgatcgccgcatcctgaatcgcgccaaacaccgtactgtagctatgggtgtgcagctttttaaacgcccggataatcgaggcgttgccgaccgcgaagccgaagcgccagccggccatattaaaggtcttggaaaaagtataggtttccactccccatgctttggcgtcgggctgggagaagaggctcagcggcgcatcgctggccgcgctgccgatggccgcataggcaaaatcatggaggatcggcacctggtgacgacgagcaaactgcagcgcgctggcgaacagcgccggcgtggcgagggcgccggttggattatgcggatagttaagcaccaccagcccggccttgtcagcgacttcccggggaagatcgttaaaattcggcaggaaatggttctccgccctgagcggcaggccataaaacgccgcctgggactgcagcgccgccgagcggtaaatcggatagcagggatcggtggagatgaggtattgcccggggctgagcagcgcccgcgggatgccgcctataccgatatgcgacccctgaaacacggcgacttcgctgtgcggatcgagttccacatcatactgccggcgatagaaccgggcgatcgcctcgcggacctgtggtttgccccagaacgacgggtagccatggttttcacgacgatgaatagcgctctgcagcgagtcaatcacttccggcggggtgggttgatccggactgccgctggaaagatcgatcagcggcagcgcttcggtgttgacctccgcggccagtttttccagcaggctgaacagattctcttccagggcgtccaccagcggcgaagcagtaaaatcaggcataacattcccggtttaaatcacgaataattaaccatctttaagggatttatagcggctggctaaataacaatatacgcaaaagattcttgtttttaagatatgtcggtatagcaaaagttaatgaggaattagcaaaaggaaattcggcgttctggcttacaacccacagtcggctgtgatttaatcgttcaatatcgccaaccctccaggaaaataccttatgaacaagtcagttgcgcgcgggatcgctctcgccctgttgtcggccacctctttttatgccgccgccgacgctcatcttatccgcgtcggctttaaccccgggccgtataaagaacaatttgagaaaggcgtcgcgccctatttattgagtaaagggtataaaatcgaatataaggatttcagcgacggtattcaggtgaatgacgcggtagcccgcggcgatatcgaagcgaatattatgcagcatccggtatatctgaaagcaattaatgagcggctggggatcgataacgtgggcattgtgcaggtccccacgccgccgatggggctgtatggtgggaaactgaccaccctggggaccccggcggcgggcaccgtcgtgtcggtaccaaaccagccgtcaaatgaatatcgcgcggtactggtgctggagagccttggctgggtgaaaattaaaccagacagcgatccggccactttttcgcagcgtaacatcgtagataatccttacaaaattgtcctaaaagagatggataatgcccagcaggttcgcgctctgccggacgtcgactatggcctgattcagggcaattttgccgtctccagcggtatgtccctgacctcggcattaaagctggaagcagccaccagccattttattaatgtcgtgaccgtcgccggtaaaaatcagaaggcgcagtttgccaaagatattatcgatggctaccactcggccgagttcaaaaaatatattctcagccatccgcagtatgatggttacctgctgcctgactatttaaaatgaataacgcgatgatagaatttcgccacgtcagtaaaagcttttccaggaaaggacatccggttctggccttgcaggatattaatctcagcattgagcgaggcgatatttttggcattattggctacagcggggcaggaaaaagcaccttattacggctgattaatcgtctggaaacgcctggcgagggcgaggtactgttaaacggcgagccgctacaggcctgcagcggccagcgcctgcaggccatcaaaaaagatatcggcatgatctttcagaattttaatctgctgaattcgaaaaccgttttccataacatcgccatcccgctgattttacaggggcgcgacaaggcctttatccaggcgcgggtggcggaactgctggcgttcgtcgatctgagcgacaaaatccacagctaccctaatgagctgtcgggcggacaaaagcagcgggtcggtattgcccgggcgctggccaccaacccgtcggtccttctgtgcgatgaagccacctcggcgctcgacccccacactacggtgcagatcttactgcttttgcaggagattaatcgtcggtatggcatcaccatcgtattgatcacccatgagatgtcggtgatccagaaaatctgtcacaaggtggcggtgatgcaggcgggccgtatcgttgaacagggggcggtttttgatctctttgctcagccgcagcatccggtcactgccagtttcgtgcagtcggtggtgcacgaccgcctgccgcagcgggtggcgtcgttcctgcagcgcgataacggcgcccgggctttacgcctcgaatttgtcggcgcgacggcgcagcagccgattattaaccacctgatccgcgagtatgctgtcgaggtgaatatcctgtttgccagcatgtctgaagttcagggccggattctgggatttatgattgtgcagcttctcggcgagcctgacgaaaccgaacgcgccatcacccatctggtcgatgcaggagtgaaaatcacccatgtttgatcttattgataccgccatcaccggcgatcagtttctgctggcgctgcatgacacgctgattatggtcgccgtctcgctgggctttggcgcgctgatcggcgtcccgctggggattgtgctggtggtttgccgtcccggcggcatcgtggccaacccggtggtgcatcaggcgctgaatccgctgattaacgtgctgcgctcgctgccgtttatcattttgctgattgtgatcctgccctttaccagactgctggtgggcaccactatcggcaccgcgggagccatcgtgccgctgatcgtctttgtcgccccctacattgcccgattagtggagagctcgttgctggaggtggatgaggggatcctcgaggccgcggacgccatgggcgcaaccccgctgcagactgtctggcactttatgctgccggaggcggcggcatcgctgattctggccctcaccacggcgaccatcggtctgctcggcgccaccgccatggcgggtacagtgggcggcggggggatcggggatctggctattacctatggctatcagcgcttcgacgctttcgccaccctcactaccgccctggtgctgattgtgattgtccagcttatccagacgctggggacccgcctggctcgccggctgcgccgtgaataactgccaattcgcaccgggatccgcgcaataaaggtaaggcgatctccaacgctctccagaatggcagggcgatattaatgcggcgtaaagaaattctgagaatatatataatggattatataatcacgatgtatgctaattgcttatatcaatctgaaaataactaaaggagagggggtgacacgctttttgattgatcttgccaacggctttgttactatccgggcggcattcgattttatttaataatgtctgataatggaatagcaaaatacataatggagtatgaaatgaagcatgttcacaagctggcctggataggcctgttcgtcaatattattatctgttttgtcgcgcgaaatttattacttgatgaaggacagctgaacttccatagtcgggcggacggcgtatggtcctggctggtgctggccctgtttattgccgtggtggttcaggcgatcagcataatgctgtcaggccgctacccttatctggccatcgtcctggcgtttattggcggcatcgtgatggtgcccgccagcgtgatctttctggtgggtagtctgttcagcttgcaaacgcggattaacgccggatttacgccctggcgatcaaccacggcagtgggcgaggctgataaccagcagctattaacctttaatgcctcaggcttttatccccaaggggcgctggcgctcatcgccgggatcattattttaatgattggcatgggtataggcggagtatttattgccgccggtattgttgcgctgtgcaatggctatcgtctgcaaaatcgggtggtgattggcgtgagcggcgagtcgatgatatttacgccggggctctatgccgatacctacgttattcccttgcgggatgttgccgtagttgaacgcagcaataatgatgcgaaagtccgactgctgatccgttccagcggcagaagcttcacgttgcgtaaaaaactgctcgccggcgataaggttaatgacgccttcgccgccattctggcaaaactgactaccgtttaatgctggcagaatagagaagccgccaggcggcgcgaggcgtcctggcggtgaaaggtggagttagcctgcgcggctaccgcaccagcttgtctcttacgaacagcactgcctgttaatccacgttagtaaaataatcgcgcgcggcggtctcgacgcgtttcgcatccagcccggtcttctcagtgatctgttcgataaacgatttaaatttttcgctcatcacgttacccccttcccagtgggcgacgtaaaatttgcactgatagcgataaaaatggagagtggtatctcctaacgtgtaatacatgcgcttctcctgtccggtagtacggttgccgcgtccacagcgtcagcaacctctttctcattacgatcgatctgcattctatcctcctcccaattggctgaaatttccagcggtgctttgcgccatggagcaggataaagcaatgttaatctgcggatagatagtgattttttctaatgtggagcaaaagtagcggttacctgcgggccgcgcaggtaaccggagaacagggcggattagcgcagcgtgttgcgctcgtcgtcggacaggtccagggtctgcaccataccactttcagcagagcgcaccgccgcttccagaacggccatcaccgccagcgcttccaccggcggcaccggattggcgatctggcccttcagcgcatcgcggatcagcatatagtactggcgctgatcgccctgcggggtagcctgcgcgtgggcctgcagcgaggcatcatagataaccagcgggtcgtcatcctggccccagccggcgctgcccggtaccacgcccgccagcagctggctctcctgttggtcggcccgcgctttgataacgctacctttatcgccgtgcacggtgaagcgcgacgagccgcccgcgaccagcatgctgcagtgcaggatcactttatgcgccgggtagtttaataccacatgcgcccagtcgttgatctccgcgccgtcgcgcagggtggctatgttaccttgcaccgactgcggcaaaccaaatagctgcagcgcctggtcgatcaggtgcggccccaggtcgaaccacaagccgctgcccgggacgttctgctcgcgccagcggacgcggacttccgggcggaagcggtcgaaatgcgactcgaagtgtttcaccgcgccgagggtgccttgctcaatcacctgacggatcccgagatagtcgctgtcccagcggcggttatggaagacggaaagcagacgctgtttctcctccgccagggcgatcagctcccgggcctcctgcatatcgagggtaaagggcttatccaccaccacatgtttgccggcgttcagcgccaggcgggccagcggggcgtgcgtggcgttaggggaggcgatgaccaccaggtcaacgtccggatgctggaccgcagcttccggggaggcgatcaccgtgacgtccggcaggtcgcgtttgaccttctcttcatcgcgggaagcgacgaacgccaggttcagccccggcaccgaacggataagcggcgcgtggaaggtcttaccgacgaatccgtagccaatcagggcgatatttatcgtgttgttactcatcaggttctccacgttgttaagcgtcagcaatatgtacagagagggcggggtcatcccccagctcagcccagggacgatcaagaaaaagatggtgaatgtcgctgagtccggccacccgccacggttcgcagcggttgagtttggtatggtccgccaccagccagtgctcggcgctggcggccagcatggcgcgtttaacgtcggcatcagcttcctggctggcgctcagccccagcccggcatggagcgcgcaggtgccgagaatggcgatatcggcccggtagcgggtgaccagcgacagggtggcgctgccggcgaacagccgttgtttactatcccactggccgccaagcaggatcagctggatatcggcacggtcgctgaacagctgagcgatatccagagaagccgtgatcacggtcaacggccctttcagctgggctgccaccgccagcagcgtgcttccggcgtcgagaaacagcgtcgagccagagggaatgcgcgcggccacctgctgacccaggcgctgcttggtctgggtgagaagagcgtttctgccctggcgcgtcatggccgggacgttaagggcgatggccccgccgtggcttttctgcagcacgccctgttgttccaggtcgctcagatcgcggcgaatggtatcggccgacacctgcagatctgcaaccagttcgctgatgctcagctgaccggtttcgctaagcctgtcgagaatatgtttttgcctggcgagcttatgcatggccattgactccgcaaattaacgcaataaacagcataatacagcaagaagttgcaaaataaacggcaaaacgtcgctctgtatgtgttgaatcgtgaagaacttgatttcactaagttttaacgttaaatgaggggagcgccgcgaccggggcgaaagcgcttttcaatgaagcgactaggcctgtatttccgggtcattaaaagcaagaatgcgcgctttcgcgtaccttatagagaaggcgcgtaatttagcagatatggattaacggaggttgagtggacgcgattaaaggctcggagttgcagataccggacgcgatcttcgcgtgggtgctcgacgggcaggggggcgttaagccgctcgccgatgacgatattatcgacaaagacaagccttgctggctgcatctcaactatacccatagcgacagcgccgactggctggcggccaccccgttgctgcccaataacgtacgcgatgccctggcgggagagagcacccggccgcgggtgacgcggatcggtgacggggcgctgatcaccctgcgctgtatcaacggcagtaccgatgagcggcccgaccagctggtggcgatgcgcctgtatatggatgagcggctgatcgtctccactcgtcagcgcaaagtcctggcgctggacgatgtgctgggcgacctgaaggaaggtaatggcccgacggacggcggcagctggctggtggaggtctgcgatgcgttgaccgatcatgccagcgagtttatcgaacaactgcacgatcgcattatcgacctggaagacgacctgctcgatcagcaggtgccgccgcgcggatttctcgcgctgctgcgtaagcagctgattgtgatgcgccgctatatggcgccgcagcgcgacgtttatgcccggctggccagcgagcggctgccgtggatgagtgacgatcagcggcggcgaatgcaggatatcgccgagcggctggggcgcggtctggatgagatcgacagctgtatcgcgcggacggcgatcatgagcgacgagatcgcccagattatgcaggagtcgctggcgcggcggacctataccatgtcattgatggcgatggtgtttctacccagcacctttttaaccggcctgttcggtgtcaacctcggcgggatccctggcaacagctggcatctggggtttagccttttctgcttgatgttagtcgttgtcatcggtggtgttgcgtggtggttacatcgcagtaaatggctgtaaagaatcgccttttagcggctgtagtgccgggaaaacccggcaatgtttgagcgaaatcaataaaccatctacccattcagggcaatatctctctcgcaggtgaatgcaacgtcaagcgatgggcgttgcgctccatattgtcttacttccttttttgaattactgcatagcacaattgattcgtacgacgccggctttgttgagtcggctttttttttgcgctctccggaccagcttctacccttactaggacacccgacggtttctggccgttgacgcttgcgggtacgcccgtatcactctccgggaggcctctatgtattacgcttcagggctgacagcccagtctatccctatctcgcccgagccgaacgatccggctcctttacccgacccacgaccgcgtccgcagccccagcccgatccgccgcctgacgaagagccgattaaattgtcgcatcaggcgcggagatctgcgaggatacgcgcctgcagattgtctgccttttaatacgagaatacattgtgaccgctttttctaccctgactgttttacctgccgcccaattagccaaccttaacgagctgggttatctgtcgatgaccccggttcaggccgccgccctgccggcgatcctcgcggggaaagatgtgcgcgtgcaggcaaaaaccggcagcggaaaaacggccgcatttgggctgggtctgctgcagcatatcgatccggcgcgcttcgagacccagtcgctggtgttatgcccgacccgcgagctggccgatcaggtcgccggcgagctgcgccgcctggcgcgctgcctgccgaacatcaagattctgatgctctgcggcgggcagccctttggcgcccagcgagattccctgcagcatgccccgcatattatcgtcgccaccccgggccgtctgctcgatcatctgcagaagggaacggtctcccttgacgcgctgcagaccctggtgatggacgaagcggaccgcatgctcgatatgggctttagcgatgccattgatgaggtgatccgcttcgcaccggctgaccggcagacgctgctgttttctgctacctggccggcggcaatcgcggcgatcagcggccgggtgcagcgcaatccgcagacaattgagatcgacactgtcgacgcgctcccggcgattgagcagcagttctttgaagtttcccgccacggtaagattgccctgctgcagcgcctgctcagccagcatcagcccgcatcctgcgtggtgttctgcaataccaaacgcgattgccaggcggtctgcgatgcgctcaacgccgccgggcagagcgccttgtcgctgcatggtgaccttgagcagcgcgatcgcgatcagacgctggtgcgcttcgctaacggcagcgtccgggttctggtggcgaccgacgtcgctgcccgcggtctggacatcaaatccctggcgctggtggtgaatttcgagctggcctgggatccggaggtgcatgttcaccgcatcggccgtaccgcccgcgccggtgaacaagggctggccatcagcttctgtgcgccggaagaggcgcagcgcgccactattctggccgacatgctgcagctttccctgaactggctgccggcgccgacgggcaacaccatcgcgccgctgacggcggagatggcgacgctgtgtatcgacggcgggaaaaaggcgaaaatgcgcccgggagatgtgctgggagccctgaccggggatatgggctttgatggtgccgatatcggcaaaattaccgtccaccctgcccacgtctatgtggcgatccgccagaatatggcgcagaaggcgtataagcagttacaaaatggcaagatcaaaggtaaatcctgccgcgtacgactgctgaagtaagggcaggagagtgcgtctcaggcggctgcctgagacgcgtgagggttatttcacttccactacgttcagacgcagctcatcgagacgggcgtcttcttcttccggctgccagccggcgggctgcaggggaatatcttcccggtcaaacgccagatcgccaccatccaccacctctgagccgtgggtgatgcctttaaaatcaaacagattgacgtcgctcaggtgcgaaggcaccacgttctgcatcgcgctgaacatggtttcaatgcgcccaggataacgcttgtcccagtcgcggagcatatcggcgatcacctggcgctgcaggtttggctgcgaaccgcacaggttgcacggaataatcgggaagcctttggcctgggagaagcgctcgatgtccttttcgcggcagtaggccagcgggcggatgacgatgtgtttgccgtcgtcgctcatcagcttcggcggcatccctttcattttgccgccgtagaacatattcaaaaacagcgtctgcaggatatcgtcgcgatgatggccgagggcgatcttggtcgccccgagctcggtggcggtacgatagaggatgccgcgacgcaggcgagagcacagcgagcaggtggtttttccttccgggatcttctctttgacgatgccgtaggtgttctcttcgacaatcttgtattcaacccccagctgctccagatacgccggcagaatatgctccgggaaccctggctgcttctgatcgaggttcaccgccaccagcgagaaggagatgggcgcgcttttctgcagattgcgcaggatctccagcatggtatagctgtccttgccgcctgaaagacaaaccataatgcggtcgccctcttcaatcatattgaagtcggcaatcgcctcaccgacgttgcggcgcagacgtttctgcagcttatcgatgttgtacttttcttttttactgatttcttggttttgcagcatgtaatagtggctcaattcatagtgtggcatcagaagagcacgcattctgccagccgctgaacaacgtggcgctggcgcgtagcaattattgaggtttgacaggcaaccgtggcgtgtatggtacggattcaggggcggaatgtcagcatctttccggcactttcggcagcgagcagccaggcgggggcggctgatgcggaaataaaaagcccgccgggcggcgggctgcggcgttagcggaccaccagtaccgagcactcggcgtgacgaaccaccgcggcggcgttggagcccagcagataagttgtaatatccggtcggtgcgaagcgatgatcaccaggtcggctggcagcgacttggccagcgcaaggattttatcttttggcgatccttccgcgacgtgaaaatgcatccggtcttccgggatggagaactgcttcgcgatctctttcaattgcgtttcagaaccctcacgcagctcgtccatgccgggaagctcagcggtataggccattcccagtgaggcataatagggcagagaagggatcacggtgaggaaatgcacctcggcgtcgtcaatccgcgcttccgattcaacgtgactgataatgcgttcagtaaattctttatcagagatatcgatagggacaagaatcattctgctcataaaacctcctgtttaagtatcccttcatattgtacggtattagggcacgttttgtatcatgaccgcagtcacactttgacattaacgtagcttgcgttcgggaaattttcctttgatcaccccgtcataataccggccttttgacaccacctgtaaaaaatcatgaaaaatacgcggtgggaccccggtatattgtaatggcggctggtgatagaaatagatttccagtgtggcggaggcgtcatcgtaggcgacggagataattcgggaagatttaaccggatggtggtgcatgatggacgtcctcgggcaagcactgactggccatgactatatcattaaacggacggctattttagtccgcgagatatagcgttttgttttatctgcagcgaggcgggtgggggaaagcccgccggaaccggcgggcaggcgcatcagaactggtaaaccaggcccagggcgacgatgttatcggtagagataccgttgtcttcgtagaatttgtcgttaccatccagcaggttgattttgtaatcaacataggtggacatattacggttgaagtaataggtcgcgccaacgtccatatatttgaccagatctttatcggcatagcggccgttattgtacagatctttgcctttggactgcaggtaggagatggccggacgcaggccgaagtcgaactgatactgcgcggtgacttcgaagttttgcgttttattggccacgccgtcattgccgtacggggtcatattgcgggtttcagagtacatggtcgccaggtagatatcgttggcgtcgtacttcaggccggcggtccaggcttccgctttatcgccgcgcgcgttggtctgggtcatctgatcgttagtacggtcagacgaggtgtaagctgccgccgcgctgatgcccatgccgaagtcgtaggaagtagagaggccgaaaccatcgccattgtcgaagcgaacatcgctgtcgctgctgcggttattggtgccgacgttcatatcctgcgcgttctggccttcgtttttgccctgatactgcagggcgaagttcagaccctccaccagaccgaagaaatcgctgttgcggtaggttgcgacgccgttggcgcggcctgccataaagttatccgcataggtgtaggagtcgccgccgaactccggcagcatatcggtccagccttcaacgtcgtacagcacgccgtagttacgaccgtagtcgaaggagccgtaatcgcccactttgataccggcgaatgccagacgggtccacgcctgatcgctggaggtctcggtgttgttggcctgaacgttatattcccactggccatagccggtaagcatatcgttgatctgggtttcgcctttaaagccaaaacgtaaataagtttgatcgccgtcttttttcgagtcgctggagaaataatgcagaccatctaccttgccatagagatctaatttattcccgtctttattataaatttccgccgcatgcgcggcaccggcggctaataaagccggaataacgagggccagtacttttcttttcatgaagaaattcctttaactgtttttatgttttaacttccgggtgggaagtgaactcatgctaaaggagcggtctgagatccggtaagactcaattgttacgatataagtaaaatctaaaataaataataccaatgaaatggtgataattatgctgaatgcatttannnnnnnnnnnnnnnnnnnaaattatacatgcccgggctaatcacgtattatttgcgcgttatatgcctttattgtcatgccaataatttattgttgccgtctcattctgcggaatgatgttgtttatcggtaaaacgacaagcccgaacgttgtgttcgggctttttttatggacagaggtgacggggcggttaaccttcgcttggcgatttctccgctttgccagccagctgggcgaggaagtcatagcgcttctgcagatcggcggcggcgtctttccatagctgctccgccacttcaggctgctgggcgttcaggcggcggaaacgttgctcattaagcagcgtctcggccagcgcgtctgatggcggacgggaatctagcgccagcgggatcttgccttcgtctgcccgacgcgggtcgaagcggtagagcggccagaagccggtggcggtcagctgacgcatctggtcgtggctgagcgccagatcgtagccatgctcttcgcaagggctataggcgatgatcagcgatggccccggataggcttccgcttcctgaatcgctttgaccgtctggttcagctgcgcgcccagcgaaatttgcgccacataaacatgaccgtacatcatcatgctgacgcccagatctttacgcgccttgcgtttgccatgctcgccaaacttagtcactgctcccagcggggtggcttttgacgcctgcccgccggtgttggagtaacactgggtgtccagcaccagaatattgacgttttccgtcaggctcagtacatggtccaggccgccgaagccgatatcgtaagcccagccgtcgccgccgatcagccagacggatttctccaccagcgcgtcggcatcggtcagcagctcttcagctcccgccacgccggccagcgcctgacgcagggccgccacctgttcgcggcgaacttccggcgtcgcctcggcgtgcagcgccgcgttcagctctgccggcagtttgtcggcgaattcgctcagcaggcgcatcacgcgctggcgatgctggtcgacggtcaagcggaagccgagcccgaattcggcgttatcctcaaacagcgagttggcccacgccgggccgcggccgttggcgtcggtagtgtacggtgtcgagggcaggttgccgccgtaaatggaggagcagccggtggcattggcaatcagcattcggtcgccgtagagctgggtcagcagtttgatatacggcgtttcgccacagcccgagcaggcgccggagtattcaaacagcgggctaatcagctgcgaggtgcgaatatcaatgcgctcaagtttgctgcggtcgatttccggcaggttgaggaagtactcgtaattgaccttctcctcttccacatgctccaggcgggacatcatattgatggccttgatctccgggttctggcggtcttttgccgggcacacttcgacgcacaggttgcagccggtgcagtcttccggggcgacctgcagaacgtatttctgcccgcgcatatcgcgggatttcacatccagcgaatgcaggctggcaggggcgttctccatctcttccggggcgaccactttggcgcggatcgccgagtgcgggcaggcggcgacgcagtggttgcactgagtacacagcgcttccttccagatggggatctcttcggcgatgttgcgtttctcccagcgggtggtgcccatgggccaggtgccgtccggcggcagggcagagaccggcagcgcatcgccgagcccggccagcatcgcggcggtgaccgttttgacgaaatccggcgcggcgtcggagaccaccggcgggcggttcggactgctggcgttcaccggctggagcggtacttccgccagtgattcacgggccagggccagcgcctgccagttgcgctccaccagctcctgacctttactgctgtagcttttggcgatggctgcctgcagttccgccagcgcgctatcacccggcaggatctgggttaaatggaaaaaggccatctgcatcacggtattaatgcgcgccccgaggctgcattcgcgggcgatctttgccgcgttgaccacgtaaaaacgcgcttttttctgattcagggtggcctggacttcctggggcaggcgggaccagacctcatcggcgctgtacggcgtgttgagcaggaaaatgccgccgggcttcagccgctcggccatctggtatttatcgataaactgcagctggtggcagccgacgaaatcagcctgcgaaatcagatacgatgaacgaatcggtttttcgctgacccgcagatgcgagacggtgaggccgcccgctttcttcgagtcatagacaaaatagccctgggagaaccatggggtcgagttgccgatgattttgatgttgtttttggtggctgacacgctgccgtcgctgccgaggccgtagaacagggcctcgagcttggcctctgccggcagggtattttcgcccaacggcagcgacaggttggtcacgtcatcatagatcccgacggtaaagcgcggcttcggctgggcggcctgcagttcactgaatatcgccagcacgcattccggaccaaactccttggaggagagaccgtagcggccgccgatagtgcgcggtagcgtctcgcgctcgccgcggttaaaggcttccgccagggcggtcatcacgtcgaggtaaagcggttcggcaagcgcgccgggttctttggtgcgatccagtacggcaaccgcgcgggcgctttccggcagcgccgccagcaggtgggcggcggagaacgggcgatagaggcggacttttagcacgccgactttctcgccgcgactcagcaactcatcgaccacctcttcgcaggtgccgatggccgagcccataatgacgatcacgcgctctgcctgcgggtggccgtaaaactcaaacggtttgtactgacggccggtggcggcagcgaaatcgtccatcgctttctcgacatggtcatacaccgcgtcgtaccacggattggtggcctcccgggactggaagtaagtgtcggggttggccgaggttccgcggatcaccgggtgttccggattgagcgcgcgctggcgatgctcagcgatcttatcctgcggcagcagggcgcgaatggtgtcatccgccagcggggcgattttgttgatttcgtgcgaagtacggaaaccatcaaagaaatgaataaacggcacccggctttgcagggtggcgatatgcgagatcagcgcgaaatcctgcgcttcctggacgctgctggcgcacagcatggcgcacccggtctggcggacggccatgacatcggaatggtcgccgaagatcgacaacgcatgggtagcgacagtgcgggcggcgacgtgcagcacaaacggcatcagctggccggccagtttgtacagcgtggggatcatcagcagcaggccctgcgatgaggtaaaggaggtggagagggcgccggtctgcagcgcgccatgtacggcgccaatggcgcccgcctccgactgcatttcgaccacgcggggaacatcgccccagacgtttttcagcccattgccggcccaggcgtcagcctgttccgccatcgttgaactgggcgtgatcgggtagatggcgataacttcactggtgcgaaacgcgacggaagcgaccgcgccattaccatcaatcgtaatcatatgaagacacccttacattgcgcaaaagaatggacgcgtgaaaccgcgacgcgccctgtaattatataaggggtagtttagcaaaccgctgaccccgccatttttgcatttgtgtcctcaatgcgccgggtacccgtgaccagatcaatattttgcgtggttcgcggagaaaatggctgcctgccgggagaggaaccacctgcgccgggcgacatggccgaggcagatcaagctttcggcgaaaatttgctagaaaatgttaatgaggcgcataaatacgtacttcccctctcgacgccgcccgccacgctgcctattattctggggtttgcttttttaagacgtttctgaggggagagagaatgcgagctgcgatgttagtaggatgtgcggcgctgttgctgtccgcgtgcagtagtgaacccgttcagcaggccacggcggcgcacgtcacgccgggaatgcgggcggcgatgagcgacgccggtcaggccaactgcgccatgataggcggctcgttatcggtggctcgtcagctcgatggttcggcgattggcatgtgcgcgctgccgaacggcaaacgctgcagcgagcaggcgctggcgggcggcagctgcggctactaacagcggccccgtcgcggggcagcgtcagcggcacatcaacgccggctagtgcatcaggtcggcgagcttatagaccagcgtctggtcggcggtcgccagcgtcaactggttttccgtcagatcgacctgcgcaccctcgcgcagcatcttgtcgatcgtcgcatccagggtattgagctgggcgtcgtggcacagcatccgggtcatcgccagcgatttgaccttcagctcgccgtccgacactttaccttccccgctaaagccgttgcacatattgccggatacatacatcttgccggtaatagccatcttctcaccgaagctcagctccagcggccggtcgctggcgttgaccgcctggccgttgacgctggtcagcacgaaacgatgatgctgcagctgttccgcaccggtggacactttactgttatagacacagccggacagcagcatacctgccgccagaagcgccgcaaatttgttcattttcactccaaaacattcacataactaataaaaccaagccagtgtaacggtatcgcagcagggatctgtgggggttatctgaatgtgctccccccgggagaggagcacaaaagggaaaggcgtcagacgatggcgttcggacaggtttcgccgttggcgacctgctgcaggttacccagagtggtctccgaaatgctgatcagcgcctcggcggtgaggaacgcctggtggccggtaaacagcacgttatggcaggcggagaggcggcggaagacatcgtcctggatcacgtcgttggatttgtcttcaaagaacagatcgcgttcgttctcataaacgtccagccccagcgcgccaattttctggtgcttcagggcgtcgatggccgcctgggagtcgatcagggcgccgcggctggtgttgatcaccatcaccccgtctttcatctgatcgaaggcttcgcgattgagcaggtggtagttttcgtcggtcagcggacagtgcagggagatcacgttcgattccttgtacagcgtggcgaggtcaacatattctacccccagctccagcgcggcggcgcttgggtacgggtcgaacgccagcaggcgcatgccgaagcctttaaggatccgcaacatcgctacgccaattttcccggtgccgatcaccccggcggttttgccgtacatggtgaagccggtgaggccttcgagggagaaattggcatcgcgggtacgctggtaagcgcggtggatgcggcggttgagcgacatcatcataccgatcgcatgctcagcgaccgcttccggagagtaagctggaacgcgcacgacgcgcaggccaagctcctttgccgcctcaaggtcgacgttgttaaacccggcgcagcgcagggcgatatatttcaccccgtgggccttcagctcttccagcaccgggcggctgccgtcgtcattgacgaagatacataccgcttcgcaaccgttggcggttttggcagtcttcgctgtcagcaggaaatcgaagaattccagttcaaagccgtatgcatcattaacgtgctgcaggtactttttatcgtactgcttcgtactataaaccgcgattttcataagacttttctccagtgattataccgtcacggtagcatatttaaaataatcgtacaattattaaaaaatagtttaatgagagggtgctaatcctaattctagagcatatcgcggacttgcggaatctctttgaaagacagtgtttttcaccacaaactgaggctgaaagcgccgggggcgagcagcagaagcggccacagcagaccggagctgacgttagccagctgaaacgaccacagcggcagactgctggcgccgctaacgaagggcagcgtagccctcaggggagagagaaagcggctgaaaaagatagcccacgagccatagcgctgaaagaagaggcggctgcgggccagacgctcggcggtcagccagcgtagatgggtgaggcgatgacggtagcgaatgcccagccgccacgatagccagaatccgccgatggcgccgaggctggcgctggaccacattaacaggaaatgtccgaggctggcggaagcgaatgtccccagcagcagcaggccggaggtgccggggattgccagcgagaccaatgcgcaggatttagtgaaggtaagcagaaaaacaatcagcaatacccatggatagtggtcctgtgcgctctctatgagcgagataattaacgacaccgcctctcccgcaagctattcccgtctggctggagtgtggcaggggcgacttaaacaacagttaaatgataatggccgaacgtcgcgccgcgagtccggctggcaactatgctttaacaggccgtaaactttcactcactggtcgaacgtgtcacaatggacgcctttcagcttttacttatgttgaatcaggatattaactgcccatgaagggtaaatataaagccgccatcgcgctggtgttagttctggtgttattgccgctaaccctgctgttgacgctaacccactgggtgccgacgctggcgggcatctggctgcccgtgggcacgcgtatctctttgcaggagagcccgcgcctgacgcggtcggccctgctgatccccgatctgcgttatctggtgggcgactgtgaaatcgcccgggtgaccgatgcccgtctctcgcgtcccagccgctggcggctgcatattggccagctggagatcaacagcgcctgcctgagcaaactgcctgccagcgatccctctcccggttcaccgcgcacgcttgccgaatggcaatcgatgttgccctatagctggttaaccgttgacaatctgcggctctcgccgtgggagaaatggcaggggcggctggtaatgtcattaacgcctgcgcagcaggatatcggctttgccgggaaggaactgagtctgcaggcgcgcctgcgcggccaggcgctcaccgtcagccagttcagcgcccggctgactgacgatcagccgccggtgaagctggtggggaccttccatctgccgctggtgccggatggtctgccggtcgacggccagatgcagggcaccttcgaattcccgcagactgcggaatggatcgatgctgagctcgagtggcagcacaatcgcggccagctgctggtcaccccgcggggtgaggtagagcctattctggacctgccgtgggagatcactccggagcggatcaccatcagcgacggccgctggcgcacccgttacgaggcgtatccgctgcgcgggcgggtggcgctgtcggtgggtaactggcagcagggcaccgaacagatgatcgtcagcggtcgcctgaatgttctcaccgaggggcatgccgggaagggcaatgcggtactgaatattggtccgggcaagctgagcatggataacagcgatctgccgctgcggctcaccggcgaggccaagctgggggagatgatactatacgcggcgctgccggctcagctcagcgggccgctgatcagcccgcagctggcttttcaccccggtgcgttgctgcgctcgcgcgggcgggtgatcgacgcgctgaatattgacgaaatccgctggccgctggccggggttaaggtcactcagcagggcgtcgatggccgcctgcaggcgatccttcgcgcccatgagcagcagatgggcgactttacgctgcatctggacggtcaggcgagcgattttctgcccgacagcggccgctggcagtggcgctactggggcgagggacattttaccccgatgcaggcgcgctgggatgtgaagggcagcggggagtggcgcgacaatgctattaccctgagcagcctctccaccggcttcgataagcttgagtacggcacaatgcgggtcagcaccccgcgtctgaccctcgagcagccgatccgctggctgcgcgatgctgagcatccgcggttgaccggcgcgctgtcgctggacgccgccaaaaccaccttctccggcggcagctatctcccggcctcaacgctgaaattcgctctcgacggtcgggacccaacgtggttccagttcaccggcgccctgcatgccgaggctatcggtccggtgcgtctgtccgggcgctgggatggcgaacggctgcgcggccaggcgtggtggccaaaacagtcgctaacggtgttccagccgctggtgccgccggactggaagatgaacctgcgcgaaggcagtctctacgcgcaggtggccttctcggcggcagccgggcagggatttgaggcgggcggccatggcgtcctgaagggcggcagcgcctggatgccggataaccagatcaacggcgtcgatttcgtcctgccgttccgcttcagcgacggtcactggcagctgggcatccgccgcccggtctccctgcgcattggcgaaatcgtcaaccaggtcaccgcgcgtaatctgacggcggacctgcagggcacctggccgtggagcgaggccaatccgctgcagctcagcgacgtcagcgtcgatctgttaggcgggaaactgacgttgctgcagctgcgtatgccgcagcgcgacccggcgttgatccgcctgcagcatatctccagcagcgaactgaccagcgccgtcaaggtgaaacagttcgccatgtccggcgcggtgagcggcgcgctgccgctgtggctggagaataatcaatggatcatccacgacggctggctgcgcaatgacggaccgatgaccctgcggctggataaagacaccgccgatgcgctggtggcggataacgtctccgccggggcggcgattaactggctgcgctatatggaaatctcccgctcgtggacgcagattaacctcgataatctgggcgtgttgacgcttaaggccagcatcaacggcaccagccgggtggaagggaaaagtagtaccgtgcatttaaactacgctcatgaagagaatattttcgacctgtggcgcagtttgcgcttcggcgacaatttacaggcgtggctcgagcagaatgctacgctgcccgtacggcgctgtacggacggtaagacatgtaaggaacctaaatgaagaagctgttactggccatggtggcgtcgatgctgctcgccggctgtacgccgcgcatcgaaatcgcggcgtcgaaagagcccatcaccatcaatatgaatgtcaaaattgagcatgagatccatatcaaggtcgataaggatgtggaaaacctgctcaaatcccgcagcgatttgttctgaggcgacgatgagaaaacgactgttaaccgcggcgctgacgctggctttactctgcgcgcccgcgctggcgttgaccctgagcgaagcgcgccagcagggacgagtgggggagacgctgaacggctatctcgcgccgctgcgtcaggataaagagacgctggcgctggtaaagcagattaacgccgcgcgcagcgaaagctaccagcagctggcggatgacaacaatctgccggtggatgaagtggcgaaaatggctgggcagaagctggtggcccgcgcgcagcccggggagtacgtccagggattgaacggccagtggctgcgcaaataattagcgacagcgcttgcggtattcccccggggtgacgccaaagcgctgcttaaaggcggtggagaaatggctgtggtcgctgaagccccagcggtagccgatccccgccagcttttcatcgtcatggacattctgtaacgcctgggcacacagatccaaccgccggttcttaatatactgcgccaccaccagcccctggtcggcaaacagccggtacaggctgcgtaccgacatgcccgtctcgctggccagccactccggacgcagatgctccgactgaatggacgcatcgattaacgcaataatcttctgaaactgcttttcccgccgggaaggggcaggatcgcgctgatgcagcaccgggcgcaacaggcaggcgatcgcctccagcgcggcttcgctctcgctggcggagagcgtcgtgccgcccatgctttccagcagcagtcgctggctgagctggaccattggcagagatttgtccagccggcaggcggtagtgatgtcccctgtgggcgccacccgctggcgcggcagcagcagcgaggcctgacgcgaggtctgctgccagacaatcgagcaggggcgggcggcgtcgattaacgtgatatcgcctgccgccagcgtcacctggcgatcgtcctgttcgatgatggcttcgccggcgagctgaaacacggtatagaaccaggcgtcgttatcgcgttttatctcattgcgcgtgcggtagagattgacgccggcggcggtgacggtactgaccttgaggctgccggcgtagcgggcgtcaatctcgccgtggaaactctccttcagcggccgggcggcgaaatggccgcagacctgattgatcgtcgccagccagcgctgatatgccagccccccctctgccgtggtcatcattcgcccttctcctgtaataacaatgtttccgcattgttgcatttgtgtcgcctcaggcaagggcgcgatggcgggtatatgaaagaactattacccgcggcacatttctgcgagggcagacgacggaattgcggcgactgtcacagcggcgcaaacgaatgtcacagagaaaaaagcgccaaccgccaaccagacatagactgaaagcactatccgcgatgaataaggaaagggtatgtccacctcacagatagcgctgcttgccagcgtccagcagtttttagaccgtcagcatggcctgtatatcgacggcgccccctgcgccgcgcagagcgaaaaccggttaaccgtctgggatccggccaccgggcaggcgattgccaccaccgccgacgccagcccggcggatgtcgaccgggcggtgatgtccgcctggcgcgcttttgtcgatcgccgctgggccgggcgcaccccggctgaccgtgaacgcatcctgctgcgttttgccgatctggtggagcagcacggcgaagagctggcgcaactggaaaccctcgagcaggggaaatccattgccatctcccgcgcctttgaggtcggctgcaccctgaactggatgcgctacaccgcggggctgaccaccaagatcagcggccggacgctggacgtttcgatcccgttcccgcaaggggcgcgttaccaggcgtggaccaaaaaagagccggtcggggtggtggcgggcatcgtcccgtggaatttcccgctgatgatcggcatgtggaaggtcatgccggccctggcggcgggctgttcgatcgtcatcaaaccctcggaaaccaccccgctgaccctgctgcgggtggcggagctggcgacccaggcgggcattcctgacggggtgttcaacgtggtcaccggcagcggcgccggctgcggcgcggcgctgaccgcccatccgcaggtggcgaaggttagctttaccggctcgacggcgaccgggaaacagattgcccgcgtggctgccgaccgcctgacccgcgtgacgctggagctgggtggcaagaatccggcgattgtgctcaaagacgccgacccccagtgggttattgaggggctgatgaccggaagcttcctcaatcaggggcaggtctgcgccgccagctcgcggatctacatcgaagcgccgctgtttgacaccctggtcagcggcttcgagcaggcggtgaaatcgctgcaggtggggccgggtatgcaggagacggcgcagatcaacccggtggtctcccgggcccactgcgacaaggtggcggcctacctcgaagaggctcgccagcagaaggcagagctcatcagcggcagcgccggaccagatgcgggagggtactatattccgccaacgctggtggtaaaccccgacgccggactgcgtctcagccgtgaggaggtttttggcccggtggtgaacctggtgcgagtggccgatggcgaggaggcgctgcgcctggccaacgacagcgattttggtctgaccgccagcgtctggacccgcgatctgacccaggccctgaactacaccgaccgtctgcaggcgggaacggtatgggtcaacagccataccctgattgacgccaacctgcctttcggcggcatgaagcagtctggtaccggccgcgatttcggccctgactggctcgacggctggtgcgaaaccaaatccgtctgcgtgcgctactagccctccgtcggggaaggcgaaaggcttttcccgacgcgccccttgccgacctccggtctttctcgctactgtggagggcaatctttgcctaatctgggcggtgaatcatcaggaggtcttcggcatgacagcatttcctaaggttgcgctaattggtcccggcgccatcggcaccacgattgccgccgccctgtttgagagggggagggcgccgatggtctgcgggcgtaccgcccattcggcgctggtgctgcgcactgacgagggtgagatcgtggtgcccggcccggtgcacaccgacccgatggcgatagccgcccccttcgacctggtctttgtcgcggtgaaaaccacccagacggaggccatcgccccctggctgacggccctgtgttcccctgacaccgtggtgtgcgtgctgcaaaacggcgttgagcagcgccagcagtttgcccccttgaccgtcggcgcgacggtgctgccgtcggtggtctggttcccggcgcagcgcgatgccgatgcctctgtctggttgcgcgccacgacgcgcctgacgctgccggatctgccgggggcagagcgggtgcagcaggcgctggcgggaacccgctgcgcggtggacctggcggctgattttaccaccgtggcctggcgcaaactgttgcagaacgcggttgccgggctgatggtgctgaccggacgacgcgccgggatgttcgcccgggaggacatcactgccctcgggctggcttatctgcgcgaatgcctgcaggtggcgcgggcggaaggggccgccctgagcgacaacgtgccggaggagattatcgccggctttcatcgggcgcctgccgacttaagcacctctattctgatcgatcgcctcaatggccgaccgctggagtgggatattcgtaacggcgtggtgcagcgtcgcgggcgccagcacggcattccgacgccgctcagcgatatcatcgtgccgttgctggcggcggccagcgacggcccgggctgacccgggctggcgcgggtgcgagccactggaagcgggatctgctatgatcccgactttcgttgtctggagccagtcgatgttcaacgacgccattgtttatgaccgctacgggccgccggccgccgtgctgaccctgaaacgcctgccgctggcgccgctggcgggcggacgggtgcgggtcaggatgcgctttgccccggtgaatccttcggatctgatccccgtgaccggcgcctatcgccaccgcacccgactgccggccgtcgccggctatgaaggccttggcgaggtggtcgccgcgccatacggcagccggctggccgcgggccagcgggtgctgcccctgcgcgggggcggcacctggcagcggtttatcgatctggatgagacctggctggtgccggtgccgccggcagttgacgatctgctggccgcccgcgggtatatcaatccgctgacggcgatgctgatgctcaagcgctggccggttgccggaaaacacctcgtgctgaccgcggcatcgtcctcctgcgccagtctgctggggcagtgggcgctggcgatgggcgcccgctcggtgagcgggattattcgctcgccgcagcaccgggcgcgcctggaacaggccgggatctatccgatcctcgataccgaccgggcgctgatggagaaggtcagccagcacagcgatctggtgtttgacgcggtgggcggcgaactggcgaatacgctgctgtcggtgctgcccgggtcgtcgaccctgatctcctatgggctgttatccgggcggccgctgacccagacgcgcggtagcgcgacggtgcgcaagtttcatctgcgggaggcgctgccgacactcagcgtggcggcgtggcgggcagcgttcgacgaaatctggcagcgcctgccgacgacctcccagccgccggcccagcgtatagcgttgaacgacctgcgggcggcgattgccgccgccggccagccgggaagaggcggtaagatcctgctggatttcaccgccggttaagattactttttcttttcgcccagagtaggggtttcgtcaaagaagttccacggcttgagcagcgcgtgcgcccactcggtcggcatgatcggccactcttcggcgcgcgccacgtgggtggtgccggtggtgatccacacgacgtcatcgtggttagtcagcgactcatcatccttcgcgtactggcccaggccggtatcgtgggcggaacggttcgggtatttcccttccggatatcgctctgtcgggtggtagcgcgtcacccacagctgtttatccataaagctcaggcgatgatatatccactcgtccggggcgaatttggcaccggtcgccgccgggtgcgtgccgccggcgtaagggataatctggtatgagaccgggttgcccatgcggttctctttgctggtgttgctcagcaggcggatagtgcccgggtcgaatttctgcgccgctttttgctcgctgtcaatcgtgtactgattcacctgcatagtactggtgcgcgggccgccggcggtgttgggcttcacttccgggtccatcgccaccagggtgttgttctcgccgtccacatcgaggtcgaggcggaagttatagatgtgctggtgagtggtgccgacaatattatggtcgatcagcgttccgtagcgggtatcctctttggcgctggggtcatgcatagtcttcgccagcacgcctttcaccgcttcaatgccggtggcgccggcatcgataccgatggtgccgttgtcgtggaacacccagtcaaagatatagtcgtagttgccgacggtgctgatccagcgcaccaccagctcccggcgctcggtactgacgttgggcttgcccatctccaggtgcttatattccggcccggcatagcgttcgaatatggccaccgcgcctggaatcgtggtcggtttgccggtgtaatcggcgatagtttcgtccagcagtaccgcatttgacggcgcatctttaccgcgaacaatcggcgacgtcagggtgcccatgccgtaatcgcccgagtcgaggtaggctttgaaataccagccgacgtccgggtcgccgtagggaacgatcatcccgccgagggaaccttcatacatcacttggcgttttgtgccgttatcgttgtaggtcaccgttgacagaattggtccgacgcgcgagttaagacgcaggtggaaatcccagttctgccagtgaatggtatcgccggtaatggtgtagtttttgccttccggttcagtaatatccagcggtttcaccgccggggcgttgcggtcgcgaccatcatacggacggggctccattgggaccgggatcaccggaccttcttcgattttgatgattttcttcgcttcaaggtcgaccaccgccaccaggttttcaatcgggtgcgcccagtagttgccgtcgccggtatccagataactgaccaccttcagcagacgcgcatcctgctgcaggccatctttgccatcaaaaaagccaacggtgagcggggtggtgaccactttgccaggatcggtaataccgtgctttttcagcacctcagcgaattcgctgctggcattgatgatgttctgcacgctaacgaagtcatcgagcagcaccatcccgtgggcgcctttgatcggcgtccaggagaggatttttttgttttgcagatcgaccacggcttcaatgacgtgtttgccatcgagcatcaccacatcggcagtgcggggagcatcgaccggcgttccctgcagggcaaaggcccataccgccgccttgtccggctcgtgtaaggaaatctcagtaaagcgggtattcggctgaaactccggcgcggctttgacaatggtcactgcttcactgatttccgccgccgagagcgagtttaacgggtgcgggcgcttttccacctggaaggtctgatcgagaccggactggaacacatcgttgataaaggtatcggaaacccaggctttaccttccttcattaccacaggcaccggtaggtcaagggatttaccgttgacgatcgccgttttggcgccgggctttactttgacgtaagcgccgtcttttatcagggtgaacatttgcgcgtagtcatcccactgcacatcggcgccgaattcctgcagcgttttatccagcggtaccatgtgggcttcgctaccgtgagcgaagaccggtgattgccaggcgcaaaccaccgccacggccagcgccagcgcggttttacgaggagaaaatttcaagccgtttgccattgtgacctcatcttattgttgtgttgtctcttgccgctgcgaatgtcggctttgtcatccttaagctaccagccagcggcgccggggcgtttgtttgcttttgccagcttgtttgtcagttttgccagacgggcgtaaaaaatgcctccgcagaggcattgagaacgtgcgctgatttttttgccgggtggcggctgacgccttacccggcctacggtctgtgcggcctgccgttaatttattcaccattcttgctggcccgagcccgggggtacagggggcggcggcgactggccgccccctgtgcgctccctgcgctatgccaggcataacgcagacgattaaccgggagcgcaatgtgcgctgaagccacggataacataaaggacttcccggggcgaaaccgttgcaaaccgattgctgtatcaatggctaaagggtcggccaacagagcgccagcgatctatttttcgctatcacgccgggaaatctccctgttgacgcgccaccagggttagaatggaatacagcgccaccgcctgctggtgctggttgaaaatctccaccgcccattccaccacgccggtggctttctcatcggcgctgcgctgacgtttgaccgttttccgcttacaggtgaggcgaacctgaatggtgtcgcccggtttgaccggctcaataaagcgcaggttttccatcccgtagttggcgataaccggcccgacgccggcatcgacgaacagcccggccgcggcggagatcaggaaatagccgtggaccacccgctcgccaaaaatcgactcggcggcggcgattttgtccatatgcgcgtagaaatgatcgccgctcaggcaggcgaagttaacgatatccgcttcggtcagggttcggcgcggggttaataagctgtcgccaggctgaatctcttcgaaatatttgcggaacgggtgaatacggtcttcgttcacctgggcgccgcgcacccactgttgaccgatggtcgccagcatcgttgggctgccctggaccgcggtacgctgcatatagtgtttcaccgagcgcagcccgccaagctcttctccgccgccagcgcggccggggccgccgtgcaccagctgcggcagcggcgagccgtggccggttgactcaaccgaggacgcctcgttcagtatctgaatacggccatgggcgcgggcggcgccgaggataaactcgcgcgccagctcgccgctagcggtgaccaacgtccccgccagactgccgccgccggcgcgcgccagcgtcagcgcatgctggcggtcgcgatacggcatcagcgtcgccaccggaccaaaagcttcaatggcgtgaaccgccggcgtttcatccggctgtgagcagtacaacagggtcggcgggaaaaatgcgccggccgcgctgagatccgcctctccaccgagcagtacttcgcagccagcggctatcagcttattgacgctctcctgtacgtcctgacgctgttcgctattaaccagggcccccatcttaacgccctcctgcgcagggtcaccgacggttactttatgcaggcgggagatcagtgcatcgctaaccgcattaatctgagccagtggcacaatgattctgcggatagcggtacatttttgcccggctttcgccgtcatctcgcggaccacttcccgaataaacagcgcgaattccggttgctccggagtgacgtcttcgcctaacacgcagcagttgagtgaatctgcttccatggtaaagggaatggatttggctaccaggttagggtgcgcccgtagctgctggccggtggcggctgacccggtaaaggtcaccacgtcctggctatcgaggtggtcgagcagatcgcccgcgccgccgcaaatcaggctgatggcgccctccggcaccaggccgctgtcgacaatcgctttcaccattgcctgggtgagctgggcggtagcggttgccggtttaatgatagccggcataccggcaagccacgtgggcgccagtttttccagcattccccagcaggggaagttgaaggcgttgatatggacggcgacgcctgattttgatgtcagcacatgacgcgcggcaaaaccgccctgtttggagagcgggatgagctcgtcttccggccacaggatatcgtccggtaattctcgactaccgagcccggcataggtgaaaagggtaccgataccgccttcaatatccacccaactgtcggcgcgagtggcgccggtttgcgcggagatggcgtagaactggtctttctgctccagcaggtgtttcgccaccgctttcagcatcgcgctgcgttcaataaaggtcatcgcctgcagggctttgccaccgcgctcaatcgcgaagcggcgcgcctgcgccatatccaggccttcactggtcacctcccaaagcgccgcgccggtgatggcgtgatggatagtacgggcgcggccccggccggtctgccaggcgccggataagtagctggctaactgctgcatcgcaaatctccaaatgtgttacgtgtgatatctataaatagttcttttatgaatcataaaatgcaagcccgtatttaataaattattaacattgtgatcgcgatggcgttacgcattatgcttaatttnnnnnnnnnnnnnnnnnnnnnnnnnnnnnnnnnnnnnnnnnnnnnnnnnnnnnnnnnnnnnnnnnnnnnnnnnnnnnnnnnnnnnnnnnnnnnnnnnnnnnnnnnnnnnnncacataaatttttttgttgtgaatatcggaatcataaaggtgatgacgtgacagaagaacaacgctttgaccagcgcatcgcgcaggaaacggccatcgaaccgcaggactggatgccggatgcctaccgtaagaccttgattcggcagataggccagcacgcgcactcggagatcgtcggcatgctgccggaaggcaactggatcacccgcgcgccgacgctgcgccgcaaagcgatcctgttggctaaggtacaggatgaggctggacacgggctgtatctctatagcgccgcggaaacccttggctgcgcccgggaagacctgtatcagaagatgctcgacgggcagatgaaatactcctccatttttaactacccgaccctcagctgggcggatatcggcgtgatcggctggctggtcgatggcgcggccatcgtcaaccaggtggcgctgtgccggacctcctacggcccctatgcccgggcgatggtcaaaatctgcaaagaagagagctttcaccagcgtcagggatttgaagcctgcatggcgctggcgcagggcaatgacgcgcagcggcagatgctgcaggacgccattaaccgcttctggtggccggcgctgatgatgtttggccccaacgatgacaactcgccgaacagcgcccgcagcatggcgtggaaaatcaaactgcactccaacgacgagctacgtcagcgcttcgtcaacaataccgtgccgcaggtagagatcctcggtatgaccgtcccggacccggatttgcagtttgatgaagccagcggccactaccgcttcggcgaaatcgactggcaggaatttaacgaggtgattagcggccgtggcatttgcaatcacgagcggttggccgccaagcgtaaggcctgggaagagggcgaatgggtgcgcgaagccgcgctggcccatgcgcaaaaacagcaggcccgcagcgcggcatgaggagagacaacatgagtaaagtttactggccgttatatgaagtgttcgttcgcagcaaacaggggttatcccatcgtcacgtcggcagtctgcacgctgccgatgatcaaatggcgctggagaatgcccgcgatgcctacacccgccgcagcgaaggctgctcaatttgggtggtgaaggccagcgaaatcgttgcttcgcagccggaagatcgcggcgaattcttcgacccggcggaaagcaaagtctaccgtcatccgactttctataccgtgccggacggcatggaacatatgtgaggcggcgatgaataaccctaaccccgtagccacctacgccctgcggcttggcgacaatggtctggttctggcccagcgtttaggcgcctggtgcggccatgctcccgagctcgagatcgatcttgcgctggccaatatcggcctcgacctgctcggccaggcgcgcaattttttaagctatgccgccgagcttaacggctgcggcgacgaagatacgctggcttttggccgcgatgagcgccagtacagcaacctgctgctggtggagcagccaaacggcaattttgccgacactatcgcccgccagttctttatcgacgtctggcatgtcgccctgttcagccggctggtgaacagccgcgacgcgcagctggcggccattgccgctaaagggctgaaagaggtgcgttaccaccagcgctttagccgcggctggctggagcgtctgggtaacggcaccgaattatcaaatcgcaaaatgcagcaggcggtcgacaatctgtggcgcttcaccggcgaactgttcctggctgatgaagtggagctcagcctggttgagcagggcattgcggttgatccgcgtgaactgcaggccgaatggcaaagcgcggtacacacggcgcttctcgactccggcttacagatcccgcaggaagcggccttccgcagcggcggcaaacaggggctgcacagtgaacatctcggcccgctgctggcggagatgcagtatctgcagcgttcgcatcccggactgcagtggtaagtgaggtgactatgcaacgtcttgccgatatcgctcctgcagaggttcgcaccatctggggattattaagcgcgatcccggatccggaagtgccagtactcaccatcaccgaccttggtatggtgcgcagcgtcgcgcgccatggcgacggctgggtgattggctttaccccgacctattcgggctgtccggcgacggagcatctgctgggggagatccgcacggtcatgagcgagcatggctttcagccggtacatatcgtcctgcagctggatccgccgtggaccaccgactggatgagtcaggatgcccgcgagcgcctgcgccagtacggcatcagcccgccccaggggcacgcctgccatgcggacatgcccgttgaggtgagctgtccgcgctgcggcagcgcccatacctcgctgattagcgaattcggttccacggcctgcaaagcgctctatcgctgcgacagctgccgggaaccttttgattactttaaatgtatttgaggttgccatgacgacgttccattcgcttaaggtggcgagagtcgagccggaaacccgcgatgcggtgaccatcacttttgcgattccgcaagccctgcaggcggaatactgttttcgcccgggccagcatctgacgctaaaagcccgtctgggcggcgaagaactgcgccgctgttactccatttgtcacagccgcacgccaggcgaaattagcgtcgcggtcaaagccatcgacggcggacgcttctcgcgctacgcccagcacgatatccagcagggtatggagctggaggtgatggtgccgcaggggcatttcggttatcaaccgcaggccgaacggcagggagaatatctggcgattgccgccggctccgggatcacgccgatgatggcgatcattagcgcgacgctggcgaccgagccgcaaagccgctttacgctgatctacggcaaccgcagcagccatagcatgatgttccgccaggcgctggccgatttaaaagaccgctatccgcagcgcctgcaggtgatccacctgtttagccaggagtcgatggacagcgatctgctacaggggcgcattgacggcgacaaactgcgccagctcgctgaccatctgctggatttcagccgtttcgacgaggcctttatctgcggtccggcggcgatgatggacgaggcggaagcgacgttacgtgaacttggcatagcggagaaatcgattcatctcgaacgctttaataccccaggcggcaatgtgaagcgggccgctggagtgcaggcggaagggcgcacggtgaccatccgccaggacgggcgcgatcggcttatcgccctcagcgccgaagacgacagcatcctggatgccgcattgcgtcagggcgccgatctgccgttcgcctgtaagggcggggtatgcgccacctgtaaatgtaaagtgctgcgcggcgaagtggcgatggccgccaattacagcctggaagcggatgagctggcggcaggctacgtgctgagctgccagtcgctgccgaccagcggcgatgtggtggtcgactttgacgcgcgggggatggcatgagtgacctgctgatccaccgtcatggccgggtgcttcagttgacgctgaaccgcccgcaggcccgcaacgcgctgaacaatgccttattaacccagattgccgaggcgctggaggcggcggcagttgatgacagcgtcggcgtctgcgttattcgcggtaacgcgcgttttttcgccgccggggctgacctcaatgaaatggcggaaaaagatcttcctgccaccctggatgatattcgcccacggttatgggcgcgaatcgatgcttttactaagccgctcatcgcctcggtcaacggctacgcgctcggcgccggctgcgagctggccctgctgtgcgacctgattgtcgccggggacaatgcccgctttggcctgccggaaattaccctcggcataatgccgggcgcgggcggcacccagcggctgatccgcagcgttggcaaggcgctggccagccggatggtgctgagcggcgagagtattgacgcccgccaggcgcagcaggccgggctggtcagtgatatccatccggcggcgttaaccgatgagtatgccctgaaactggcaaccaccattgcccgccattcgccgctggcgctacgggcggcaaaacagtcgctacgcctggcgcaggaagtcagcctgcaggccggtctacaacaggagcgccagctgtttagcctgctgagcgccaccgaggaccgccgcgaaggcatcgacgccttcttacaaaaacgtaccccggaatttaaaggacgctaatcgtggaagctttcattctcagcgcagtggaacagggcgtcatgaccattaccctcaatcgcccggaccgcctcaacagttttaacgatctgatgcatcaccagctggcggaatgtctgaagcaggccgagcgcgatgatggcgtgcgctgcctgctgatcaccggcgccggccgcggtttttgcgccggccaggatttgaacgaccgcaatgtcgaccccagcggcccgccgccggatctcggcatgtcggtagaacgcttttacaacccgttagtgcgccgtctggcggcgctgccgaaaccggtcatctgcgcggttaacggcgtggccgccggcgcgggcgctaccctggcgctgggctgcgatatcgtgctggccgcgcgttcggccaaatttgtgatggcgttcagcaagctcggcctggtgccggactgcggcggcagctggttcctgccgcgggtggccggccgtgcgcgcgcgatggggctggcgctgctgggcgacagccttagcgcggaacaggccgcgcagtggggaatgatctggcaactggtggacgattcagaactggcggataccagtctgcaactggcgcgccatctggcggcgcaaccgacgtttggtcttgggctgattaaaaaggcgctgctggcctctgaaaccaacagtctcgatgcgcagctggacctggagcgcgattatcagcgtctggccgggcgcagcgatgattaccgcgaaggggtcagcgcgtttctggccaaacggccaccacagttcagcgggaaatagatgatgacgacatccttagccaccgtggcggtgatcggcagcggcaccatgggggccggcatcgccgaagtggctgccgccgccgggcatccggtgcgtatttttgatattaaccctaaggctgtagacctggcgatagagggtatcgccgggcgtctggcgtcacgcgttgcgcggggcaaactggcgtcagagcaggccgacgcgctgctggcgcgcctgcatccggcccacgatttagccgcacttgccgatgcagatttagtgatcgaagcggcctctgaacggctggaggtcaaaacggcgctgttcgcgcagctggcggcgatctgcgcgccgtcaacgctgttgaccagtaatacctcgtctatttcgattaccgctatcgccgccggggtcaaaaacccggagcgggtggccggactgcacttttttaatccggcgccggtgatgaagctggtcgaggtggtgagtggtcttgcgacctccacagaagtggtggagcagctgtgccagtgcgtaagcggctgggggaaacagccggtgcgctgccgctcaacgcccggttttatcgttaaccgcgtagcgcgtccgttctacgctgaggcctggcgcgcgctggaagagcaggtcgccgccccggaggttatcgatgccgctttgcgtgacggcggcggcttcccgatgggaccgctggcgctgactgacctgattggccaggacgtcaacttcgccgtgacctgttcggtgtttaacgccttctggcaggaccgccgctacctgccatcgctcctccagcaagagctggcgctggccgggcggctaggtaaaaagagcggccacggcgtctatcgctggcccgctgagacactgccggacgcggcgctgccgccggtaatgataggtgctgaatccgttaccgtcagaagtgacaacgtcactgaattagacgatatcttgctgctggagactgaaggcgagaccgccctggcgctgagtattaagcatcaccgcccggtggtggtgtatgacctgtgcgccagcgatacggtggtgctggccgcagcggcaaccaacgcgcctgcggccactgataaggccgtgcattacttccagcagcagggcaagaaagtgctgcgtattgccgattatcccggcctgctggtgtggcgcacggtggcgatgctgattaacgaagcgctggatgcggtacaaaaaggcgtcgccagcccgcaggatgtcgataccgcgatgcgccttggcgtgaactatccgcatggcccgctggcatggggagaacgccttggctggcggcgggtgctgcaactgctggagaacctgcaacaccattatggcgaggagcgctatcgccccagttccctgctgcgccagaaggcgctgatggagaagcaccatgagcaatgatccgtggcgcaacgcgcgcgtgatgtacgaaaaagatacctgcgccagaaagatggggatcgaacttatcgaaatggacgacggttttgcgcagatgagtatgaccgtctcggcggacatgcttaacggccatcaaacctgtcacggtggtcagctatttacacttgccgataccgctttcgcctacgcctgtaacagccaggggctggcggcggtggcctcggcggcaagcattgattttcttcgtccggcgtttgccggcgaccggctggtcgccaccgccagagtcaaacagcagggcaagctgaccggcgtctacgacatcgaaattgttaatcaacagcaaaagattgtggccctgttccgcggcaaatcgcaccgcatcggcggcacaatcacgggagacgtgtaatgcgcgacgcctttatttgtgacgggatccgtacgccgattggccgctacggcggcgcgctggccagtgtgcgcgccgacgacctggcggcaatcccgctgcgtgagctcctgagtcgtaatcccgggctcgacccggcagcaattgatgatgtgattttcggctgtgcgaatcaggccggggaagataaccgcaacgtggcgcacatggcgacgttgttggccggttacccgcataccgtgccgggcaccacgattaaccgcctgtgcggatcgggtctggatgccatcggctttgccgccagggcgatcaaagccggcgatgtcgagctgctgattgccggcggcgtggaatcgatgtcgcgtgcgcctttcgtgatgggaaaagccagcacgccgtaccagcgtcaggcggaactctttgataccacgattggctggcgttttgtgaacccgctcatggcgcaacacttcggaactgacagcatgccggaaacggccgagaatgtagctgaattgttaaatatcagccgggccgatcaggacgctttcgcctggcgcagccagcagcgcacggcgcaggcccagcgcgacggcattctggcgcaggagattgtgccggtgcagattgtcggccggaaaggggcggttagcgacgtgcgcgaggacgagcatccgcgcccggaaaccacgcttgagcagctggcgaaactgaaagcgccgttccgccagggcggcgtcattactgcgggcaatgcttcaggcgtcaacgatggcgccgcggcgctgatcatcgccagcgaacagcaggccgctatccaggggctcacgccgcgggcgcgtatcgtggcgatggcgacggcgggtgtcgaaccgcgcctgatgggactggggccggtaccggcggtgcgtaaagtgctggagcgggcgggactcaatattaacgatatggatctgattgagctgaatgaggccttcgccgcccaggcgctgggggtgctcagacagctcggcgtgccggacgatgcggcgcacgtgaatcccaacggcggcgccatcgcgttaggccatccgctgggcatgagcggcgcgcggttagcgctgagcgccagccttgagctgcaacgccggggcgggcgctatgcgctgtgtacgatgtgtattggcgtgggtcagggcattgccatgatcctcgagcgagtgtgagctaatttacctgcgagtaccctacaatgataactactacaaaattagatccgattgaaaccgcatcgcgtgacgaactgcaggccctgcaaacccagcgcctgaaatggacgctgaagcatgcgtacgaaaatgtgccgatgtatcgccgcaagttcgacgccgccggcgtgcaccctgacgactttcgggaattaaacgatctgcaaaaattcccctgtaccaccaaacaggatctgcgcgacaactatcccttcgataccttcgcggtgccgatggagcaggtggtgcgcattcacgcctcttccggcaccaccggcaaaccgacggtggtgggatatacgcaaaacgatattgataactgggccaatattgtcgcccgttcgctgcgcgcggccggtggttcagcaaaagataaaattcacgtcgcctacggctacggcctgtttaccggcggccttggcgcgcactacggcgcggaacgtttgggcgcgacggtgatcccgatgtccggcggacagaccgaaaaacaggcgcagctgatccgcgatttccagccggatatgatcatggtgacgccgtcctactgtctgaatctgattgaagagctggagcgccagatgggcggcgatgcccgcagctgttcattgcgagtcggcgtctttggcgctgagccgtggacgctggcgatgcgcgcggaaatcgagcgccggctggggatcaccgccctggatatttacggtttgtcggaagtcatgggaccgggcgtagcgatggagtgtctggaaaccgttgacggcccgactatctgggaagaccacttcttcccggaaatcgtcaacccggacgacggtacgccgctggaagatggcgagcatggtgagctgctgtttaccaccctgaccaaagaagcgctgccggtgatccgctatcgtacccgcgatctgacgcgcctgctgccgggaaccgcgcggaccatgcgccgcatggatcgcatcagcggacgcagcgacgatatgctgattatccgcggggttaacgtcttcccctcgcagctggaagaggagatcctcaagtttgaacacctggcgccgcactatcagttagaggtcaatcgccgcggtcatctggattcgctggcggtgcgcgttgagctgaaagagagcgggctggcgctgagtcatgaacaacgctgccagatttgccatcagttgcgtcaccgcattaagtcgatggtcgggatctccaccgatattactatcgtcaactgcggcagcattccgcgctcggaagggaaagcctgtcgggtattcgacctgcgaaaagcggtggtcagcggttaatcctctctccggctgcgcggcaggcacccggctgaagcgtttgcgccgtcagccggggagtttcctgtgctatgattcataaaggaaaaatataacaacagaatgaatcagatgagtaaactcgacgcctttattcaacaagcggtgacggcgatgcccatcagcggcacgtcattaattgcctcgctgtatggcgacgctttattacaacgcggtggggaagtgtggctgggcagcgtcgcggcgctgctggaaggattaggcttcggcgagcgcttcgtacgcaccgcgctgtttcgcctcaataaagaagagtggcttgatgttgtccgcatcggccggcgcagcttctatcgcctgagtgataaagggttgcgcctgacccggcgcgcggagcataaaatttatcgcgccagtgccccggaatgggacggtacctggctgctgctgctttcggaaggcctggagaaaaatgtgctcgccgacgttaaaaagcagctgctgtggcaggggtttggcgcgctggcgccgagcctgctggcctcgccgtcgcaaaagctggccgatgtccagtctctgctccacgaagcgggcgtcgccgaaaacgtcatctgttttgaagcccattcgccgctggcgctctccagagcggccctgcgcagccgggtggaggagtgctggcatctcaccgaacaaaatgagatgtacgaggcgtttatcgccttgttccgacctctactgccgctgctgcgcgattgcgacccgtcagagttgacgccggatcgctgtttccagatccaactgctccttatccatttctatcgccgggtggtgctcaaagacccgctgctgccggaagagctcctgccggcgcattgggcagggcaaaccgcccgccagctgtgtatcaatatttatcaacgcgtgagtcccggcgcgctggcgttcgtcagcgagaaaggtgagagctcggtgggcgagctcccggcgccgggtccgctctattatcagcgctttggcggtttgccgggcgcataaggaggttgcatgccgatatatcagattgatggactgacgccggtggtgccggaggagagttacgttcacccgaccgcggtgttgattggcgacgtgatcctcggcaaaggggtctatgttgggcccaacgccagcctgcgcggcgacttcgggcgcatcgtggtcaaagacggcgccaatattcaggataactgcgtgatgcatggcttccccggccaggatacggtggtggaagaggagggccatatcggccacggcgctattctgcacggctgcgtgattggccgcaacgcgctggtgggcatgagcgcggtgattatcgacggggcggtcattggcgaaaacagcattgtcggcgcttcggcctttgtcaaagccaacgccgagatgcccgccaaccatctgattatcggcagcccggcaaaagcgattcgcaccctgagcgaacaggagctggcgtggaaaaaacaaggtacccgtgaataccaggcgctggtggaacgctgtaagcagacgctgcaccaggtggagccattacgggaagtcgaagcagggcgtaagcggctggcgtttgatgaaaacctgcggccaaaagccgccacctgaggggtaaaattatggcagagaaattatccgctcactgtcactgcggtgcggtggcgtttaccgtggaactcagcgacggcttcaacaccgttcggcgctgtaactgctcatattgtcgcatgcgtggggcggtcgcggtctcttcgccgcgttcaggaatagaggtggtacgcggaggggataagctcacagagtatcgctttaatacaggggaagccgtgcactttttctgctcggtatgcgggatctacacctttcatcaacggcgatcaaacccacagcagtatggggtgaatgtggcctgcattgacggcatttcgcctttcgatttcccttgcgtggaggtcaacgacggcgtgaatcatccaaaggatggcggcggaggcgtggtggggtatttacgctacgagaaaaagtaaaactctcctcccgcaggaagcgagaggagtgaaatattaggctgcaaccacgctgtcgatggccgctttcgcgtcagactgcgctttggccgcgacttccgggccgtaagcgataccttcggcgaacacaaagttcacgtcggtgatgccgatgaagccgaggaaggtggacaggtacggggtgaccaggtcggtcggagtatctttatggataccgccgcggctggtaacgacgaccgcgcgtttaccggttaccagaccttccggccctttctcggtgtagcggaaggtgacgccggcgcgagccaccaggtcgaaatagtttttcaactgcgtcgggatgttgaagttgtacatcggcgcagcgataacaatcacatcgttgcctttcagttcggcgatcagctcgtcggaaagggccagcgcttcctgctgacgcggagtcagcggcgcgtcgctcggacgcagggcgccaaccagttcgccatccagaaccgggatcggattggcggccaggtcacgcacggtgatctcatcgccagggtgtttttcctgccattgttcaacaaaatagtcggaaagctgaccagattgtgagtaccctgccagaatactggatttcagaactaatactttgctcatgggtgtttcctttttttaatgtgattgacgggtcaatgccctggtgcttgttgacactgtattcacaatcgcgccacagagatagcgcaatatatcgaatcctatgttcagattttttgaacaaggcacgaatgacacagatgtggtactctaaggcaatacttcaaaagagattttcccggcagagctctgcccgataacgctatgacagaacaacaaaaaatcaccttccccagctttatcaacagctcgacggcctgatgctgcgcgacaaaacgcgctttgcccgccgtctgcacggcgtgaagaaggttaaaaatcctgaatcgcaacaggccattctgcaggagatggcgctggagataagccaggcagccggtaaagtcctgctgcgcgaagcggcgcgtccggccatcacctatccggaaaacctgccggttagccagaaaaaacaagagattctcgaggcggtgcgcgaccaccaggtggtgatcgtcgccggggagaccggttcgggtaaaaccacccagttgcccaaaatctgcatggagctggggcgcgggctgaaaggactcatcggccatacccagccgcgtcgcctggcggcgcggaccgtcgccaatcgtattgccgaagagctgcagagcgagccgggcggctgcatcggctataaagtccgcttcagcgaccatgtcagcgaaaacaccatggttaagctaatgaccgacggtatcctgctggcggagatccagcaggatcgtctgttgatgcagtacgacaccatcattatcgatgaggcgcacgagcgcagtctgaatattgactttctgctcggctatctgaaagagctcctgccgcgccgcccggacctgaaaatcatcattacctcggcgaccatcgacccggaacgtttctcaaagcatttcaataatgcgccgattatcgaagtctccgggcggacttacccggtggaagtgcgctatcggccgatagtggaagaggcggacgataccgagcgcgatcagttacaggcgatctttgatgcggttgacgaactggggcgcgaagggcccggcgatattctgatctttatgagcggtgagcgggaaattcgcgataccgccgatgcgctgaataagctggatctgcgccataccgaagtgctgccgctgtacgcccgcctgtccaacagcgagcagaaccgcgtcttccagccgcacagcggacggcgcatcgtgctggcgaccaacgtggcggaaacctcgctgaccgtgccgggcattaagtacgttatcgatcccggtactgcgcgtatcagccgttacagctaccgcaccaaggtgcagcgcctgccgatcgagccggtttcccaggcgtccgccaaccagcgtaagggccgctgcggccgcgtttcggaagggatctgtattcgtctttattcagaagacgatttcctgtcgcgcccggaatttaccgacccggagattctgcgcaccaacctggcgtcggtcatcctgcagatgaccgccctgggcttaggcgatatcgccgccttcccgtttgtcgaagcgccggataagcgcaatatccaggacggcgtacgcctgctggaagagctgggcgccatcaccaccgatgcgcaggcaacggcttataagctaaccccgctgggccgccagctcagccagctaccggtggatccgcgtctggcgcgcatggtgctggaggcgcagaagcacggctgcgtgcgggaagcgatgatcatcacctccgcgctgtcgatccaggacccgcgcgagcggccgatggacaaacagcaggcctctgacgaaaaacatcgccgcttccacgataaagagtccgattttctcgccttcgtcaatctgtggaactacctcggcgagcagcagaaggcgctgtcgtcgaatcagttccgccgccagtgccgggtcgattttcttaactatctgcgtgtgcgcgagtggcaggacatctacacccagctgcgccaggtggtgaaagagctcggcctgccgatcaacagtgagccggcggaatatcgcgagatccatactgcgttgctgaccggtctgctgtcgcacatcggcatgaaggatgccgataaacaggagtataccggcgcccgtaatgcgcggttctctatcttccccggctccggtctattcaagaagccgccgaagtggacgatggtggccgagctggtcgagaccagccgcctgtgggggcgtattgccgcccgcattgagccggagtgggtggagccggtagcgcagcacctgatcaagcgctcatacagtgagccgcactgggagcggtcgcagggcgcggtaatggcgacggaaaaggttaccgtttacggcctgccgatcgtcgccgcgcgtaaggtcaactacagccagattgatccggcgctgtgtcgtgagctatttatccgccacgcgctggtagagggcgactggcagacgcggcacgccttcttccgcgataacctgaagctgcgcgcggaaatcgaagagctggagcataagtcgcgccgccgcgacatcctggtggatgacgagacgctgttcgagttctacgaccagcgcatcagccacgacgtcatctccgcccgccacttcgatagctggtggaagcgggccagccgtgaaacgccagacttgctcaattttgaaaagagcatgctgattaaagagggggcggagcaggtcagtaaactggactacccgaatttctggcatcagggcaacctcaagctgcggcttagctatcagtttgaacctggcgccgatgccgatggcgtaacggttcatattccgctgccgctgctcaaccaggtagaggaagccgggtttgaatggcagatccctggtctgcgtcgcgagctcattatcgcgctgataaaatcgctgccgaagccggtacggcgcaatttcgtcccggctcccaactatgcggaagcgtttcttggccgggcgacgccgcttgagctgccgctgctcgattcgctggagcgcgagctgcgtaagatgaccggcgtgaccatcgaccgcgaagcctggcagtgggatcaggtgcccgatcacctgaaaatcaccttccgggtggtggatgataaaaacaagaagctgcaggaagggcgctcgctgcaggcgttgaaagacgccctgaagggcaaagtgcaggagacgctgtcggcggtcgctgatgacggtattgagcagagcgggctgcatatctggagctttggcaccctggcggaaagttacgaacagaagcgcggtaactataaggtgaaagcctggccggcgctggtggacgagcgcgacagcgtggccatcaagctgtttgataatccacaggaacagcagcaggccatgtggcgcggtctgcgtcgcctgctgctgctcaacatcccgtcgccgattaagtatctgcacgagaaactaccgaataaagccaagcttgggctctactttaacccgtacggcaaagtgctggatctgattgacgattgcatctcctgcggcgttgataagcttatcgacgaggcgggcggtccggtgtggacggaagagggctttagtcagctgcacgataaagtgcgagccgagctcaacgacacggtggtggagatcgctaaacaggtcgagcagatcctcaccgcggtgttcaatatcaacaaacggctgaaaggccgggtggatatgaccatggcgctggggctgtcggatatcaaagcgcagatggcgggcctggtgtatcgcggctttgtcaccggcaacggtttccgccgtcttggcgatacgctgcgctatctgcaggcgattgaaaagcgtctggagaagatggctatcgatccgcaccgcgatcgggcgcagatgcttaaggtggagagcgtgcagcaggcgtggcagcagtggctgaataagctaccgccgaaccgccgtgaggacgacgatgtccgggagatccgctggatgatcgaggagctgcgggtcagcttcttcgcccagcagctgggcaccccgtatcctatctcggacaagcgagtgttgcaggcgatggagcaaattaccccatagcctggctggttgtccccggtggcgctgcgcttaccggggctactggtcaggcgtccacgcttaagcgtttacccacgccagagtaaagccgtcccagcctttagtgcccacggtttgcagcgccgttgccgtcaaccgcggctcggcgcccatcatctcaatgaactgacgcacgccctgaacgcgctcgtcggcgctctgtgggttgaccacttcgccgtcgcgtaccacgttatcgccaataattagggttcctgggcgggaataacgtagcgcccagcgcagataatggggattattcggcttatcggcatcgatgaagatcaggtcgaaagcgggacatgcgccaagcgcctccagggactgtagcgcgggtccctcccgtagcgtgacccgctggtcaacgcccgccagctgcagattctcccgcgccacctgggcatgatgcgcgtcggcctccagggtgaggagttggccgtctgcaggaagctcgcgcgccatccagatggtgctatagccgccgagggtgccgatctccagtatccgcttagcctgggttagccgtaccagcagggcgagaaactgaccctgattggcggcgacatcgtgtgccgggagcccggcacgatggttgttttccagtacccgatcgagtacaggatcgccgggaattaaggccttaattaaataattgtctactgccgaccactgttgttgcatatgacgcttccccatttagctccctgatgagtcagaccagccgcctcccagcgcccggtacagatcgatctgcgccagcagcaggttgttcttcacctgcaccacgctaagctgggtggagaacagcgttcgctgggcatcaagcacatccagataagaagagtagccgttacggtagcggttttgtgcaatacgtaaggtttcctgggcaacggtctcttgttcctgaagctcggataactgttcgccatagcgactgatggcgtccaggctgtcattgacctctttgaacgcgctgcgcaccgttttctcatagctatagagcgcctggttgcgctgggccatggagaggtccacctgggcatttaacgcctggcggtttagcagcggcgccagaatactgccgccaagactccacagccgcagcgggttgtccagcagatccggcagcgtccggtcctgcaggctgccggtagcggtcaggttaatagagggcagcagctgcgcctgcgacgaggccagcgtggcgtcggcggccaccagctggcgctcggcctgagcgatgtccggacggcggttgagcaaggtggacggcagctgcgacggcagacgcagcggggtaagctgggcgaactcgccgcgttttaccgcgccagggttatcgccgagcagcacgctgagcgcattttcctgctgcgcaatctggtgctgtagcggcgggatctgcgcccgcgttgaccgcagctccgaatccgcctgcattagctcaaggcgtgaagtatacccggtttcaaactgacgtttggccaggcgccacgcgtcttcccttgatgttagcgtctgctgggtcacccgcagctgctcatccagcgacagcagcgtgacgtagccaacggccaccgagctggcgacgctcaaattggcggcggcggcggcggctttctgcgcctcaaggctggcgccggcggcgttggccgcgctgcggttcgctccccagatatcgacatcatagctggcggtcaggccacccttatacagtgtgctgtggatcggcaggccggtggcggcggactgcgtccgggcgcgggtgccggtgaggctggcgtccagtgacggaaacaggctgctgtcggcggcgtaagcgcgcgcctgatactcattcacccgctcgcgggcgatcagcacatcgctgttatagcgcagcgcctggtcgacatactgattgagggtactgtcatgaaaattgcgccaccatacaccctccaccgggctggccgggccaacgtcggcccgccaggcggcaggaatggtcagggtcggctgcgcgcgttgcacatcggcggattgacagccgaccagcgccagaacgatagcaagggcgaccgggcggatcatggttgtttctccgcacgggtatcaatagtcacctgcaccgacatccccggccgcaggcgttcgctgttgttttgcccgtcgttgaccgtaatacgcaccgggatgcgctgggcgatcttgacgaaattgccggtggcgttgtccggagagatggcgctgaactccaccccggtcgccggggagatactctgcaccttgccgtggaaggtctcgccgttgagcgcgtctacggtgaaggtgaccggctggccaacgcgtacttcggccaactgggtctctttgaggttggcaatcacccagtgctgcggcggaaccagcgaggtcagatgggttccggcgctgacataggcgccaagacgcaccgagatctgccccagctggccgccggtgggggcgataatctgggtattctgcaggtcgatctgcgccagctcaagcgccgctttggcgctggccacgtcggcctccagcgaatcgcgattgacgatggtcgattcacggtcctggcgcgacatctccagcgccgctttcgcctgctcaatatccgccgccccttgcgccgcgctggcccgcgccgaatcacgttcgcggatcgacagcgaaccgtcggcggttaactgctggatgcgttttaaatcggcctggattttcagattctgcgcgcgggcgttttgcagcgcggcttcattcttggcgatcgtcgcctcggcgcttttgcgctgttgcaggttattgcgcagcgcggcctctttcatcgccagggtagcctgggcctgatgcacccgctgtttatagatgcgatcgtctatctggaacagcacctcgcccggctggacaatcgcgaaatctttgacgttgacggcggtgatatagccgttgacctgcgggctaataaaggtggtctgcccgcgcacataggcgttgtcggtaaactggctatggcgagtgaacggcggcagttgccaggcgtagaggatcaccagcacgccgacgaggcctatcgccgcggcggtaaaaatggaaaccacgcgaatattattccgggtgttggcctgttgtttggccgcatcctgctgactcataacgactccagagatgaaatgatgataattatttgctgccggtagcgcgttgcaacgcgatacgggcagtcagtcgtaagcgaattaagcgccagaaaacccacactagtgtcccggcggagatcgccgccgtcagcagataggtatcattccaggcgagaatattggcctgcagcgtcgcggcgttttgcagcagggtggtggcctgaacgttgagtagcgtactgtcgccaatctggctctgatacatctggctgtactgctgcagccgctcgacgatcagcgggttcagggtggttatctggtccgccagctggctggagtggaatttctcacgccaggtctggaaggtgccgaggatcgccgagccgagcagcccgccaatgttctggctcatgccgaacagcaccgagaagctgaccaggttgcgcgggtcggcaaacacgccgccaatcccggcgagcatcgccggggccagaaagaaggcgctgccgaagccgagtaaaaactggctgaacattaattgttccggacgggtgagggcgttggactggctgtcgagcagcgaggctatcatgatcagcgccagcgcggtggcggtcggccagtagagcttctgcgggttgagcgtcagacagctggcaatgatcccgcacagaataccggcgaaaatcgaccacgcgaggttagtcatctgttcgttttgcaggccaacgtactgcagccagccgatgaccccggtgttctgctccgccaacacgatgcggatcaacagcataatcaggcccagacgcacgatgctgccgctggagagccatttggtattgagcagggggttgctgcggttatgctcgaaggtaatcgcagcgacgatcagtattaccgccgccgccagcgcccagccgatccacggcgcttcaaaccaccactcgagccgccccagcgacagcacggcgcacaccagcgccatgccgggcgccagcagaaagaaggtaatgaaatcttttttttcgaacacttttttacgatcgcttggcggcagttttagcgcgatgacgcaggccagcgacaccagcgccaggcccagctcaaagaagtagagaccgcgccattcatcggtctgcagcagttcggtggaaaagaggcgcgccaggggaatggccagcgacgagccggtgatgccgatagtcagccctttcaggcgatggcgcgcaggccaggcctgtacctggtagtagatccccagcgagctgagcgccgcggccaccatgccatgggcggcgcgaaccatcatcgctgagctgagatcgttgacgaagaggtggaaaaaggtgaccagcacatagagcaccagaaagccttcggtgaaagcgcgcaggccaaactgctggcggaatttcaccagcagcaggttgatggagacgttggtcatcacgtataccgccggcagccaggcgatttctgtcgaccaggcggcgaaggtaccctgcagcagctgcaggttggcggtgaccactgcgttgcccagcgcgccggtgagacataccagcagaccgaccacgccgtaggcgaggcgtttcgccggactgtgcagcggcgtcgacggcgaaccgagcagagccggtttttcatgcggcgcccagtcatgcggggcgtaggggttatcctggcgacggggcattatttcttctccacttcgcgcaatagcttttccagcacccgctgggtttgctcctgctcctgtggggtaatcgccgtcaggatctcttcgcgcagatcgtcagccaccgttttgacctgttcatagagggccttccctttgtcggtgaccaccagcagtcgcttacgtttgtcgctggcggtggtgacgcgctcaaccagtccgagggcgaccagacgatggatcaacggcacaatggtcgggctctccacccccagctcctgcgccagttcgctttgcgacagcggctgctggtggcgggcgatggacgctaccgccacccagctggcctggctgagaccgagatttttcagccgacgattgaccgccagccgccagtggtgcgcggtgaggtataaaagatgagagaaggtaagctgtcgattgtccataggtcgtctgtcaatatcgttagagctctaacgattttatgccggataaccgccggagttcaagatgaaagatagaaattggttaacggtatgtacgttaattgtagttaatcttccggccgcgatccgtgtcgtgcggtctgctgaccaaggatatttttattctgcgccatcacccaggcgataaaggcccgcaggggggcgggaatatgtttccggcttgggtagtagacgcagaaatggtcggcaggatagcggtagtcgggtaacaaatggaccaggctgcccgcgctcagctgctgcgtcaccagcgactgatagacaaaggcgatgcctaatccgctctccgcggcctggatcattgcgctatcggcatcgacgaccagatcgcctttaaccgcgacctcgctaagctcgccgctggggccaataaactcccagcggtacttctccccaccaggaaaacagcggttaatgcagcggaaattaactaaagactgcggggtgtcgggctctccggcttcgcgtatatagtccgggctggccaccgggatcagcgatagtttctcgccaaaggggatggcaatcatctctttgggcacatcctgcgaatagcgaatgccggcgtcaaaaccggactcgataatattgactttccgatcggtggcatacagttcgagcgtcacattgggacaggcgtttttaaaggcgataaaatagtcttgaaaaaacaggtcaataacaatgcgcggtaaattaactttcaccacgccttccggagtcagacggtgataattcagactgtccaccacccggcgataatcattgaccaccggcgttatattattaagaaattcctcacccactgcggttaatgacaaactgcgcgttgagcgatttagcaggcgcacgcctaacttttcttccagatgattaatagcgacagtaagggccggtggggaaaggtttaacgctttagcggcctgacgaaaactgccatgtttcactatgagtattaatatttctatttgttgcagatcgggcaaggttttcattgttaatttccagctaacaccgcgttcggaatagattaattgttatcaatatgaaagggaagtatatatttaatgccattcagcaattaaggaaaataagatgaaaacacgttatcttggaaaagagaagtttcaggtttccgcattaggtctcggatgtatggggatgagttttgcctatggcggcgctgaaacgtcgcaggcgataaatacgatccataccgccatggacatgggcgtgaccttcctggataccgccgaagtatatggtcctttcgataatgaagttctggtcggaaaagcgattaaaggttttcgcgataaggtgcagattgccaccaaatttggatttcgtattttgccgaccggccagggtctggagcggatggccggcgttgacagccgtccggcacatattcgcgaatcagtggaagggtcgctgaagcgactgaatgtcgagaccatcgatctgctctatcagcaccgcgtcgatcccgcggtaccggtggaagaggtggtgggcactatggccgatctggttaaagagggtaaaattcgccatatcggtctgtcggaagtatctgctcagacgctgcgccgggcctgcaaggtacatccgatcgctgccgtgcagacggaatattcgctatggagccgcgagccggaggccggtattctccacacctgccgcgagctgggggtcggctttgtgccatacagcccgcttggccgcggcttcctgacggggacaattaccgatcccggcgttttgtcagcggatgatttccgccgccatctgccgcgcttccaggccgaaaccatgcgcaaaaaccagctgctgcttgagcgcctgcagcaggtggccacccgctatgacgcgacccttgcgcagattgcccttgcctgggtgatgagcaaaggcgaggatatcgtgcctatcccgggggcgaggaaaattgctcacctgcgcgacaatgccggcgccgcgaatattactctcgcgccggaggacatcctcaccatcgaacatattttcactgccgacaacgtcactggcttacgctatacccagggcgattttgatttaatcgaaaaataatcccctacgggcagcggatggttattacttgcgtgacgttgtcacctttgccgaacaactccttgtcagatagcgcacatcctcggcggttaacggcgcggcaaagaaaaaaggggcggcgcaaggccacccctgatgcggttgctgatggggatcagcccgggtagatgccgcggtctttacgcgccatcaggatgcgctcgcaggccacgatataggcggcggtgcgcagcgtacactctttctcggcggctttatcccagacgtgcacgatagcgtcggtcataatgcggtccatcttggcgttgatctcctcttcgctccagaagaagctggccatgtcctgtacccactcaaagtagctgacggtcaccccgccggcgttgcagataacgtccggcaccacgatcacgccgcgctcggccagcacgtcgtccgcttccggataggttgggccgttggccccttccagcaccagtttgcaggtcagcttctcagcgcgctcgcgggtgatttgcccttccagcgccgccgggatcaggatgtccatcggagtggtccagaaggcgtctttatcgatctcctgggcgccggggaaaccggcaatctgctttttctccgcctgccaggcggtgagggcggccatatcgattccgccttcgttatacagggtcgcggtatgatcctgaataaccacgatacgagcgccgacgccggcgaacaggcgggccgcttcgctaccgacgttaccaaagccctgcagcgccactttggcgccttcaatttcgataccggcgcgacgggcaacttcccggccggtgacaaacacgccgcgtccggtggctttttcacgaccgagggagccgccgaggtggatcggtttgccggtgaccacgccggtgatggtggtgccatggttcatggagtaggtgtccatcatccatgccatcactttgccattggtgccgacgtccggcgccgggatatctttctgcggcccgataataatgccgatttcgctggtgtagcggcgggtcagacgctccagttcaccttccgacaaggagaaggggtcgacgcggatgccgcctttggccccgccgtaaggaatattgaccgcggcgcacttaatggtcatccaggcagaaagtgccatgacttcgttaagatcgacatccggatggtagcgaacaccacctttacccggtccgcgcgacagattgtgctgaacgcgatagccctcgaagtggcggatggtgccgtcgtccatttgcacaggaatgtcgacgatcagcgcgcgcttcggatggcgcagggtttccacccagtaggcaagatcgccgagataaggcgcgacgcggtcgatctggcgcaggtaggtggtccatggagatgtactactttcagatgcgtaagataacttttccataagagtcctgtttctcagtgttatttatgtcgtgtaaaaccgtggaatagctacagcagtaaactctgtgcaatgaatggtatcaccaattttataaagcggtatttgacggcaattccgatttttaaatttttgttagattttttattttttaagtgaataactacgcacgtcaaccacccgcaagctgtgcattttaattcactttttattcacttaagtgcataagaaaatattttttctatgtttttcattatcttgatgatcttcaaaaagtgaataaattgcttttgtccgtattgacaatcttgttgttcacaggccagcattagcccacacaacaacatggcattaaccatgaattaacaattacccgtaaaaagaatagggctttatttttctgtggtgaatatttttaccatcgcagcgggtgtgctcgtgcccaaaataagccgaggggcagggttaatgtcgattgtccaacgcgacgggagcgttttccgtcgtcttacgttccggagataaattatgtcaggcagtatgactcgcgaagattttgacgcttacctggttccctgttttgcccccgcgccgtttattccggtcagagcggcgggctcccgcgtctgggaccagcaggggaaagagtatatcgatatggcgggcggcatcgcagtgaacgccctgggccatgctcacccggcgctggctcaggccctgcaggatcaactggcgaaactgtggcatatcggcaatggctataccaacgagccggtgctgcagctggcaaaaaccctcgtgcagtcgacctttgccgacaaggtgtttttctgcaactccggcgccgaagccaacgaggcggcccttaagctggcgcggaaatatgcccacgataaatttggcggtgaaaaaagcgaaatcatcgccttcaaccacgccttccatggccgcacgctgttcaccgtctccgttggcggccagccgaaatattccagcgattatgctccgctgccgcagggcattacccatctgccctataacgatatcgaggcggtcaccgcggcgatctcctcgcgcacctgcgcggtgatcgtcgagccgattatcggcgaaggcggggtgatcccggcggacccggcgttcctgcaggcgctgcgtaccctctgcgatcgccatcatgccactctgatattcgatgaggtgcagaccggcgccgggcgtaccggccatctctacgcctaccagcattacaacgtcgtcccggacattctcaccagcgccaaagggctggggggcggcttcccgatcggcgcgatgctggcgaaagaggcctgggcgcaggtcttccagccaggcactcatggcaccaccttcggcggcaacccgctggcggcaaccgtcgctaacgccgtgctggcccatctcgatgcgccgctgctggcgggcgttggcgagcgccatgcgctgatcgttgaccagttgaatgcgatctctgcccgttacgatgcgttcagcgccgtgcgcggcaccggtctgctgatcggcgctgagctggcggggccgctgcgcggcaaggccaaaacgttgaccaacctggcggcggaagaggggctgatcgccctgattgccggccccgacgtgctgcgcttcgcgccggcgctcaatatcccgctggcggatattgcggaagccttcgtgcgccttgatcgcgccgttgcccgcttaacccgctaaccgggaggacggcctgtgatgctatttcgtcccgtacgggaaaacgatctcgacgacatcgtccgcctcgccgcgcgggcgggggttggcatgacctctttaccgcatgacgtcgggcgcctggcggccaggattcggcgcagtatcgagaccttcgccggcgaactgccgcgcagtcagcagggtttcctgtttgtgctggaggacaccgcgctggcgcgggtggtgggggtgagcgccattgaggtcgcagtgggcctggatgagccgttttacaattttcgcattcagaaaacggtgcgcgcctcgaaagcgctgggagtctataagccccaggagctgcttaatctcagctatgaccacaccgggcatagtgagctgtgtacgctgtttctcgacccggcgtatcagcgcaaccgcaatggtctgctgctctccaaggcgcgctttttatttatcgccgcctttcgcgagtggttctccccgcacctgtttgccgaactgcgcggctgcagcgatgagcagggacagtcgccgttctgggatgcgctgggccatcatttcttcgacatcccgttcgccgatgccgaccggctgaccggcaccggcatgaaaacctttattgccgaactgatgccggcgtacccgatctatatctcactgctgccggaagcggcccgcggggtcatcggtcaggtgcatcccaataccgccccggcgcgggcgatcctcgagaaagagggtttcagctggcgcggctcggtggatattttcgatgccggtccggtgctggaggcggacaccgatcagatccgcgccgtgcgcgacagccagcgcctgcctgtccggcagctgatgggcgacctgccggcgccgaccctcgtcgccaacggtcaattcgacaactttcgggcgctgctggtggcccacgaagagcaggtctcgcttgacagcgccgcgctggacgcgctgcaggtcagtgaaaccgaccgcgtttatacggtaaccctgaatccagaggacaacagatcatggcggtaaaagcacagtttatagccgggcagtggctgccaggcagcggcgcaacgatgagcaaactggccccggaggatcagtcgctgctgtggcaggcggccagcgcgggggctgacgacgtccaggcggcctgcgccgcggcgcgcgcggcgttttatccctggtcgcaccggccgctggccgagcgtattgacgtcgtacagcgttttgccgcgctgctggagacgcataaagaggcgctggcgaccctgatttcccgcgagaccagcaagccgctgtgggagacccgcaccgaagtgcaggcgatgatcggcaaggccgcgatctccatcgaagcctatcaccagcggacgggctttcatgagtcgacgctgccggacggtaaagcgctgctgcgccacaaaccgcacggcgtgatggcggtctttggcccctacaacttcccgggccacctgcccaacggacatatcattccggcgctgatcgccgggaacaccattgtgtttaaacccagcgagctgacgccggctaccgctgaaatgaccgtccagctgtggcagcaggcgggcatccccgacggggcgatcaacctgctgcagggcggaaaagccaccggccaggcgctgctggaaaatcgtgatatcgacggcgtgctgttcaccggcagcgcggcggccggtttccacttccatcgctacttcggcggccagccggagaagatgctggccctcgagatgggcggcaacaacgcactgatcgtcgccgacgtggccgatatcgatgcggcgctgcatgtgattatccagtcggcgtttatctctgccgggcagcgctgcacctgcgcgcgccggctgatcgtgccgcgcggcgagcagggggatgcgctgctgcagcggctggtagaggccagcgcgcagatccgcgccggcaagtgggatgatcagccggcgccgtttatgggcggggtgatctctctcgacgctgcgcagaacatgctggcggcgcagcaaaaactggaggggctcggcggcaaggtgctgctgcgcatgcgccagcctgacccgcgctccacggtgctgaccccggggatcgtcgacgtcaccggtattgaggtgccggatgaagagtactttggcccgctgctgacgattatccgttacgacggcttcccggaggcgattcgcctcgccaatcagacccgctatggcctggccgtcgggctgatctccagcgatgcggcgcagtttgatcagctggcggacgaggcgcgagccgggatcgtcaactggaacaagccgctgaccggcgcatcgagtaaagcgccgtttggcggggtgggcgcctccggcaaccatcgcgcggcagcgtggtacgccgccgattactgtgcctggccgatggcctctctggtcagcgatacgctgacgcttccggcgacggtatcgccgggcctgccattctgataacggatcctgtgaggacatatgtctggttttgaagcaaactttgatggcctggtcggcccgacgcaccactacgccggactctccgtcggcaatgaagcctcgcaaaataaccgcgatggtctctctaaccctaaaaaggcggcgctgcaggggctgtataaaatgaaagccctggccgaccgcggcttcgtgcagggcattctgccgccgcagccgcggccgaatctgcgtctgctgcgcgaagtgggtttccagggcagcgatgagcaggttatccggcaggcggcccacgcggcgccgcagctgctctccgccttcagctccgcctcgtcgatgtggaccgccaacgcggcgaccgtctcaccgtcggcggacagcgccgatggcaaagtccatttcaccgtcgccaacctgaacaataagctgcaccgtatgcaggaggcacccaccacctcggcgatccttggcgccacgttcgccgatccgcgctactttgcccaccatgcggcgctgccgcagcatggcgacctcggcgatgaaggggcggccaaccataaccgcttctgccgggaatatgaccggcagggggtgcagtttttcgtctatggtcgacgcgccagcggcggtatcgccccggtgaagtatccggcgcggcagaccctcgaggccagcgaagcggtggcccgcctgcatcagctggatccgcgctacacggtgtttgcccagcaggcgccgcaggctatcgatcgcggcgtgtttcataacgacgtcatcgcggtcagcaatcgccatgtgctgttccaccatcagcaggcgtttgtcgatcaggcggcggtgctgaccacgctgcgggctaaaagcgacagtctggatatcccgttcaccagcgtggaagtgccggacgagcgggtttcgctcgacgacgccgtggcctcttacctgttcaacagccagctgctgagcaaaccagacggcaagatgctgatcgtggtgccggaggagtgccgccagcgggaaaacgtctggcgctatctcagcgatctcgccgccgatagcgcatcgccgatcgatgaagtggcggtctttgacctgcgggaaagcatgcgcaacggcggcggcccggcctgtctgcggctgcgggtggtgctcaacgaggcggagcgccaggcggtcaacgcccatagcctgatgaacgacgaacgttatcagcagctgacggcatgggtggaaaaacactatcgcgaccggctgcatgcccgcgatctggcggacccgcagctgctgcgcgaggtttatcaggcgctggatgagctgacgcagatcctgcgcctgggcgcggtctatgattttcagcgttaaggagcggcagatggagcacctggttaacgatttactgcactgccgcctgcaggcgtggacctttccggcgggcatcgaggcccgctggctgggcgagggcattttacagctgctgccgacggcgccgtggcgccaggcgacgatcctctccgccggcgtgcatggcaatgagaccgcgccgatagaactgctgctgcagctaacccacgatctgagccaggggcggcagccgctcacgcaggcgctgctgatcgtctttggtaatctgccggcgatccgcgccgcgcgccgctatctgcataacgacctgaatcgcctgttcggcggccgccatctggcggtcaccccgggaaatgagtcgcggcgggcttttgcgctggagcaggcggtgcaggctttttatcgcgccgccgatgcggcggggccggtcaaccgtggtcatctcgatatgcacaccgccattcgcggatcgctgtatcgccagtttgcgctgctcccggcccacgccggggatttttcgcccgatttctatcagctgctgcaggccagcgggatggacgccgtcgtgcgccataccgaagcgggcggcaccttcacccatttcacctgcgaaaagttcgccgcgcaaagcgccaccctggagctggggaaagtgatgccgttcggcgccaacgatctcagcctgttcgccgccgccgacgcggcgatccgggcctggatcgctgatgcgccgctgccgccgcgcgacaaagcgccggtggactacttcctggtcgaggagagcatcatcaagcgcgagggggaatttacgcttaatctcgcggcagacgttgaaaacttcaccgcgctcccggcagggtatgagatcgcccgccaggcagagaaacgttgggtggtgcaggcccgggccccctatatcctctttcccaacgccggggtcgccaccggccagcgcgccgggctgttgctccgcgccgctgcccttcgtctcccgcaaccagcctgaggaaacaccatgactgaacatcaacatcaggcgtcacctgccgccggaggtgaaggcgcgtcacagcttaagcgcgggctcagcgcccgccatatccagatgattgccctcggcggcgccatcggcaccgggctgtttatgggggcggggcgcaacatcgccgtcgccggcacctcgatcctggttatctatgtgctggtcgggttctttacctatatggtgatgcgggcgatgggcgagctgctgctcacccgccatgactaccgctcgtttgccgactttgtcggcgagtatctcgggccgcaggccagcttttacctcggctggacctactggctaagctgggtggtgacctgtatcgccgacgtggtggtctgcgggagctatatgcagtactggttcccggaactgtcggcgtggatgccggccctcagcatgctggcgattctgttcctgcttaacctgctgtcggtgaaaatgttcggcgaggcggagttctggttcgccctgatcaaggtgatcaccattatcgccctgatcggcaccggcggctggatgattgccaccggctggacctccccggacggcgtgacggcctccctcagccatctcaccgacccgacggcctttatgccccacggcatcaccggctttttcgccggtttccagatagcgatcttctcctttaccggcattgagctgctgggcaccatgacggcggagacccgcgatccgcagcgcattttgcccaaggcgatcaatgctctgccgctgcggattatcatcttctatctgctgtcgatggtggtgatcatcgctgtcgcctcgtggccgggggtgtcggcggagaccagccccttcgtgacgctgttcgccaaggccgggctgcctgccgccgcggcggtgattaactttgtggcgctgacctcggcgatgtcctcggccaacagcggggtcttctccagcacccgcatgctgtacggcctgtcggtggagaagcatgcgcactggcagtttcgtatcctgtcgcgcagtacccgcattccggtgcgcagcctgctgttctcctgcttctgcatgctgatcggcacgctgttgctgtttctggtgccgaacgtgatgaccctgttcaccatcgtctcgaccctggcggcgattatggtggtgttcagctgggggatgatcctcgtggcctatctggtttaccgccgtcagcgtccggacctgcacgccgggtcgatctttaagatgcccgccggggtggtgatgagctgggtgagcctgctgttcttcgcgttcgctatcttcatcatgatctttgacccggacacgctgctggcgctgttggcttctccgctgtggtttatcgcgctgtggggcttctggaagctgaagcagcggcgcgaggggcagcttcagctggacaaccagagcgcctgacacccgccggccctggcggctggctaagcaggggggaagacttgacgcctgtttgtgcccggtggcggctggcgccttaccgggcctactgtcttaccgggccagggataagcggtatcccccgcggcgcgatctccccccaggcccgcgcaagcgcagcgccaccgggcgggatagtcggcgccgtagtagccctggcgggcggcggtcaggcgctttccgcccgggagggggccgtgcccagcgcggacttcatccggctggcgcagaatatcgccaggagcgaaatcgccaccgtaacgcccagataaatggccaccggccgccagtcaccgtcatattttgccagcagaccggtggcgataagcggcgcggtgcccccggccagcgcggcgcccagctggtagccgagggtgatcccggtatagcgcacattggcgctgaaaatctcagagcacagggtgccgagcaccgcggttaccggcgcccacaggatgccgaaggcaacgatcgtcgccagcatgatgccccagccggtgccggtgtcgagcagcaggaaccacgggacgataaacagccccagcagcaccacgctcagggtgtacatcttttgccgacccaccttgtctgacagcagccccatcagcgggatcatcacggtggccaccagcgcgcccagggtcacggattccagcgcctgcgacttctgatagctcagggtggtggtggcgtagctgactacaaaggtggagaagatatagaagggggcggtctccaccactttcaggccggcggcgatcagcacttcccgccagtggtgcttgagcgtatcgcgcagcggggccttcgccacctggccggattttttcacctgcttaaaggcgggcgtttcgtcgatatctttgcggatccacaggccgagaaaaacgaggacggagctgagcaggaacggtatgcgccagccccaggcgagaaactgcgcctcatcgaacagcgtcatcagcgagacgataaatgttgccatcaacatgccgatggtcaccccggcctggggaatgctgccgaaaaagcctttccgcttttccggcgcgtattcataggccagcagcagcgcgccgccccattcgccgccgatacccatgccctgaataatgcgcagagtaatcagcagggccggcgcccagaggcccaccatctcgtaggtgggcagcaggccgatcgccaccgtggcgctccccatcagcgacagggtcagcaccagcgtcttcttgcggccgatgcgatcgccgatatgggcgaaaatcacgccgccgatggggcggataaaaaacgtcagcgagaaggagagccaggagaggatcaggccgataaccgggtcgaccatcggaaagaagattttgttgaacaccagcgcggcggcggtgccatagagaaaataatcgaaccattcgatggcgctgcctgtcaggctcgcgatcagtaccttcttgtttttctgcagaatggatgcagtgttgtcttgtggattgctcattacgaaacgttctcccgccacggtagataggtcaggtgtcactctgtacgagcagggtgcaacctgatgtgaaaaggttgtgtaattgttaagcaacttagggttgaaggttacaattggcaagtttatggctggcaaactgggcattatggcgcgcttagaactggtataaccgcgacgctattttttattttccacctgattttgctgttttttgttattttcatagtgagttgttcaggtgcaacccgcctgtttttagatgtttcttgttatttcaaaatggttacaaatcgacgccgctatgcctcccggcaggcggcgtttatgatagcgaaagcatcctctccgctcgtctgagagaggattaaggagacagaatggcagaacaatttcctccgctgtcggcagcgacgctggcggcggctaaccaggtcggcgcctggctggcgcaggacgatctggcgacgctgcccgcgttgccgcaggtggacgtggtagtgctggccggcaacgccgtgatcccaaccatcgacgccgcctgccgtctggcggcggcgcaggcggtcccgctgctgatcagcggcggcgtgggacattctacgggctatctttacgaggcggtgcgccaggatccccgttaccgtacgttgccggtggatggccgcccggaagcgcatgttctggccgacattgctcatgactactggcacatcccccattcgcggctggtggtggaggaccagtcaaccaactgcggtgagaacgcccgttttacccggaccacgctggagagccgggggctcgcccatcgtcgcgggatcgtcattcaggacccgactatgcagcggcgaaccatggctaccttcgcccgcgtctggcagggggcgacgccgccgccgcagtggttgagctttcccggctgctcgccggtgctggagcagaccgatggccaactggggttcgcgggcggcggagcggggctctggccggtcacccgctacctggggctgctgctgggcgagctgccgcgcctgcaggatacccctgaaggatacggtccgcggggaaaagacttcatcagccatgtcaccttcccgccggagatcctcgacgcctggcgacagctgcgggaggacgcccagcttgccggggcgctgcaggcccgcaccctcggctgaaaaatgcccgtttacggcagattcgtcgcaaacgggcaatttgtgttattaaaatgtaacctcaagcgggaatttttggcccgtttttatgaatcagctcacagaactgcgtcaatgtgctgccgaacagcggcttatccgcccgatatttaacaaaaaaatcacctgttaaatacaaatgcaccacaggagcagccatgacagcacccgttcaacacccgatgtatattgatggccagttcgtttccggtcgcggcgacggctggatcgacgtgcttaacccggcgaccgaagcgctgctgtcgcggatcccggacgggactgccgaagaggcgcggctggcgattgacgccgccgagcgcgcccagcccggctgggaagcgctgccggccattgagcgtgcgggctggctgtgcaaaattgccgccggtatccgccagcgtgccgacgagatcgccgggctgattgtcgctgaaggcggcaagatccagcagctggcggcggtggaggttgcgttcaccgcggactatctcgactatatggcagaatgggcgcgccgttacgaaggtgagatcgtgcagagcgatcgcccgggggagaatatccttgtctttaaacgcgcgctgggggtgaccaccgggatcctgccgtggaacttcccgttctttcttatcgcccgcaagctggcgccggccctgatcactggaaataccattgtcattaagcccagcgaatttacgcccaataatgccatcgcctttgccgagattgtccatcaggttgggttgccgaaaggggtctttaaccttgtgcttggccgcggagaaaccgttggccaggagctggccggcaatccgaaggtggcgatggtcagcatgaccggcagcgtggcggcgggagaaaaaattatggccgctgcggcgaaaaatatcaccaaagtgtgcctcgagctcggcggcaaagcgcctgccattgtaatggacgatgcggatctggagctggcggtgaaagcggtagtggactcgcgggtgattaacaccgggcaggtgtgtaactgcgtcgagcgggtctatgttcagcagggaatatacgaccgcttcgtcaaccgactcggtgaggcgatgaaggccgtccagtttggcgacccggcgacgcgagatgacatcgcgatggggccgctgatcaacgcggcggcgcgggaccaggtggcgggcaaagtggcgaaggcggtggcgcagggggcgcgggtggcgctgggcggtcagccgctggagggcaaaggctatttttatccgccgaccctgctgctggatgtacgtcaggagatggacattatccatgaggaaaccttcggtccggtgctgccggtggtggccttttcgaccctcgatgaggcgctggcgatggccaatgacagcgattatggcctgacctcctcaatctatacccgcgatctgaacgtggcgatgaaagcgattaagggactgaagtttggcgaaacctatatcaaccgtgagaactttgaggcgatgcaggggttccacgccggctggcgtaagtcggggatcggcggcgcagatggccgccacggcctgaatgagtacctgcagacccaggtggtctatctgcaggcctgaggcactccacacagaaccggcggacagcgcaggctgtccgccgttcacttagcgggcaaatttctccagcacgcggatcagttgggtgacaaagccgtattcgttatcgtaccaggcgacggttttcaccagctgtacgccgccggcctccacaatctccagctgggtagcatcgtagatcgaaccgaaatggctgccgatgatatcggaagagacgatctcctcttcggtgtaaccaaaggattcattgccctcagccgcctgcctcatcgcctgattgacctcatccgcagtcacctttttctccagcaccgataccagctccgtcactgagccggttttggtcggtacgcgctgggcatggcctttcagcttaccgctcagggcagggatcaccaggccaatggcttttgccgcgccggtagtgtgcgggataacgttttccgccgccgccctggaggcgcgcagatcttttccgcgcggcccgtccaccagcgactgggtgccggtataggcgtggatggtggtcatggtgcctacggtgatgccgaaggcatcctgcagaactttggccatcggcgccaggcagttggtggtgcaggaggccacggagatgatggtgtcatccggggtcagggtgtcatcgttgacgttgtagacgatggttttcatctcgccggcgggggcggaaatcagcactttgcgcgcgccggcctggagatgggcttgcgatttctcagccgaggtgtagaacccggtacactccacaatcacctcggcgcctgccgcctgccatggaatatgctgcgcctctttttcggcatacaccgtaatggttttgccgttgacgatcagcgcatcttcggtaaagtcgacgctccacgggaaggggccgtagtttgaatcatgcttcaacaggtaggccagcacctttggcgaagtgaggtcgttgatagccaccacttccaggctgctgtcgacttctaataaacgacgtaacaccagacgtccgatacgaccaaatccattaatcccaagtttactcatggatattctccggttggtaaaacgactcgatgtgatgaaactcctccaggcttagccctgtccccctgattggtcaactgacaatctgtgcgctttgccagggcctgcgggccggagaggggaaaagtgaatgttttcccggtcttttttgcccgtgacggcagggaatgatttttgttaccagagatgagggggctgcctgctggcgaaacgacgaaaagcgtctatgcttaactattgaatagcttagtaaaaaattgacgttagacgaagggagaggttatgggattctggagaatcgttttcactatcattctgccgccgctgggtgtgctgctgggaaaaggcttcggctgggcgtttattctcaatatcattttgaccctgctgggctatattcctggcctgatccacgccttttgggtgcagacccgcgattaaaggctgaccctcgccgcctccccctgagaccggctcagggggcatcaggcactctttatataacagcgtattatccttcgaccagtagtgccgggtctcctcttccagatcgacgatccacttaaacaccccggcgctggcgagatcccggcagtactgttcaaagttaatggcccgggcaaagtggcggataacggcggccctggtcagacaatggctggcctcagcgcgaacgcgcagcagcccgcgggcgctttttaccgagaccacctcgtcgtttgccattacgaaattcatattgccggtggagacaaaatagatgtagtaggagacctgatgccgacgcagttcattggcgaaggtggcatagtcggcgtcagaacgcgcttgctcaaaaaaatgacccagcctgaccagcagttccatttcgatccttatcgtgtcgctgtgtgcggctttggccgatagcggcagaaaccattcactaaataacttattcgcattttaataatataggcgcgttatattaatggttattgcgtaactggaacacggtttcaagtgttacaatctattgcaatcgtttggctacctggtcagcgatgcgtaagcgaacggcgaggcgggaacgaggagacaagcgccggcggggaaggccgccggcgggaaaacggcgctacttctgaatcaaatagcgaatggttgggccatcctgttgaatatccagcaccgtgtagccgtggttccttgcatcaagcggaatgttattgatcgactgcggacagtcgctgaccacttcgaggatctcgcctttttgcagggaaggcattgcctccagggtagcgaccgccggatacgggcagggttcgccgaccatatccaggcgataatcagggatgatgtttttcatgcgctctccttcacggtccggaccgccgcctggcggcggaaaaaatgtctctcccaggcgatcaccagcagcagggcgatcagcagcagtagataggtggccagtagtccgccaaagggaccgaaggcgttcagcaggttgactttctgccagtgggtggcgagcggggcggcgatatcgtcccagcaccaggcgagcagcgttgagccgatgacgttgcccagcccaacccaccagtagtgaacctggccctccaccgcccggtacatccagccggtctcacagccgccggccagcacgatgccaaagccaaatagtagcccgccaatcgccgcattaggaccggcccacataattttcggcgccatccccaattgcacatagctgaagataccgatggcgctcgccgccatgccgaagataatcgccttcgccatcaccgtccggccggtgatccacatatcgcgaaaggcggaggtaaagcagatctgcgcgcgctcaataagcaggccaaaggcaatgccaaacagcatcgccaggccgagcgccgggtggtctgcggcggtgagcaggccccagccgatcatggcgaaaaagaccaccatcccctggcggaaacggcggcgcgcctgctgcggtttttgggttaagggcgaggcggcggacactttttgcatttttaccgggatgcgaaaaaggggcagcagcgtgaagcgggcgccaaaccaggagccgatggcggtggcgatggcaaacagccaggcgtgcagggagaactgcggaatgccggtgaagaaggccgccaggttgcagcccatcgccagccgtgcgccgaacccggcgatgatgccgcccgccacggcctgcgcaatgcggatccggctgcgtggcaggcgcagtttgacgttattcgcccacagcgcggcggccaggcagccgccgaacatgccgatgatcatcctgccatcgatgcgggtcagcggcgacccttcgagatgtatcagctggtaatagccccactgttcgctgtggacgcccagcagctgcagcagctgaccaccccagcgggtgaattcgccggtcaccgcccagaaggtgccggtgatgccaaaatagtaggtagagagaatgcccgcggcaatgaccgccgggacaggagaccagaaccggataagccaggcctgtttgaaggattgccatgtcataaaaatgcctctgaactcagaaggtattaacggtcgatgaccgaccaaagggggcaaatagtacccgccttagcgcctgctttctctgttttggatcaaggccctacgcttgcgtcagcacggcaaccagcgccagcagcgcgggcagcgcctgaatatagagaattttgcggctggcggtcagcgcgccgaaaatcccggcggccagcacgcaggccaggaaaaagataaccacctgtacccccggcgcccccagccacagcccccatgccaggccggcggccagaaagccgttatacaagccctggttggccgccagcacccgggtctgccgggcgaaatcggcgctgaggttaaaggcccggcgcccggcgggggcttcccagagaaacatctccagcaccaggatggcgagatgaataatagcgaccagcgcaacgaggagagtggctaacacagcggtccttaacgattagagaaatgtttctccagtataaccgcaggcgctcaccaggcgagagggcgactgctatagtgcagatagcgtcatattttcccgccgcgaagagcgtcggtttatctgattgccctttggtttagctaagcggtgctagcatgccgggttctttttacgggtatggcataggttactgaatggtaaataaattatggattttgttatcagcgctactaatggttgccatgccgtcggcgcaggccggggaattaaacctctattcgatgaataccggttcctatgtctatcatatgacgggtaaccacggacaatataacgaacatttcaataacaactttttctcggtggagcgcaagttttctcaggattcaaaatacagcgtgctggtcggaacgatgaaaaacagctttgacgatcgctgcctgactctcggcgtgcgccgcgactggctgaaaaacgataccggctgggtactgaaaggggtgtatgcctataccggggaatttttctttgatgccttcagccactgtggggattccggcacctaccgcaccgccaaaaaaatcaccggcatcggtttttcgccctacctctatcatggcctgcaatataatttcaccgattatttcggtgtggaaggcggcattattgtgccggcgatctttgtgatgagtgttcagtggagctttcgctagacgctttatttcccgggaaaagagcaggccaccacaggtggcctgatactaacgacctggcggcaggaattaatgaaagccgagacggatcagatccaacgggcagaagcggccctcgcagccgtcgatttcaacgcagtccgcccggcgcaactgctcagcggttttcccctcgccatggatagctttaatcacgcccgtcgtcccgttaccggcgatcattaccatgctgccggtagcaatagcgttacgattacggtcataggttttcatggtctcctcctcaataaacctgggtgaaagcaatgattaagcgcgcaaattaataccgctttctgcctaaaaaagttttgaggataatcaaatttattttaataaccacctgagcataaaggcaagaagaccttctgttcgcctccatcgcatcgcctgcgcggcgaggggatgaagcgtgatactggccgtcatatgtcagccaggttactgttttatgaccagattattaaccttgccagcccgcggaaaatagcgaaagatggcaatattcgggcatcaacggtgccagtgcctgtcctgagggagccatgagtcaagacgtcaccgcgaagatgttaaagcccgattttgatagtgaagtttccggcctggtgcatggctatttgtttcatgaacagcgccccccgcagccgatcgcctctggcgaggtatgcgcccgctatcaggcgctcgccgatgacaaggcgtttatctggttacacctgaatcttaatcacgccaccgccgagaaatggttaaccagccactttccggtggccgattttttcttcgaggagatccgcagcggctcgcacaccacccgcattgagcgacagggggaaaatctgttcgctgtgcttaacgatgtgctgtttcgtccgcaggataccagcgcggaaaccgccacgctgtggctctactgtagccccaggctggtggtgacggcgcgcttcaaaccgttgcggtttatcgaatggatgctgccgcgcttgcagacgctcagggtgaacacgtctactgagctgctggcctttctgctggaggagcaggaggaggtgctggagcaggtcgtccgccaggccagccgccatgttgaccttattgaagagcgtcttctgagcaatcacgtgcagcgcaaccgggccgatctggcgcggctacggcggatgcttttacgcttccagcggctgctggcgccggagccggcggcgatgttccggctgcttaaccggccgccggcgtggatggatcgcgcggtggtgcaggcgtttcgtcagttcaccgaagagtttagcgtggtgcttaacgatctgtcgggcctgatcgagcgcatcagtctgctgcaggaggagattggcgcccgccagctggagcagagcaatcgcaccctctataccctgacggtgatcaccgtcctcgcgctgccgattaacatcgtcgccggtttcttcggcatgaacgtcggtgggatcccgctggcaagcaaccaccacgggtttatcctgctggtggtgattgtcgctgtctttaccctcggcgccggttacctggcgtttcgccggcgcgatgacctgtagattgcgcgtcgaatcagctgaggctgcgcagggcggcaatcagtccttcgacaccgcgttccagcttctcgcgcgggcagccgacgttgagtcgcagaaagccgttgccctcaggaccataggtataacccggcataatcgccaccttctgttcggcgatcagcgcctgctgtagcgcgcgatcgtcaacgttgagcgggcgcaggtcgatccatgccaggtaggtggcctccggcggctgccagccgagcgcggggaaggcgttgttgagcgtgtcggcgacatagcgcatattcgcctgcaggtagtcgcgcagggcatcgagccagggagccccgtcgcggtaggcggcgatatgggcgaccagcgccggcacggaaggggaagagagcccgtcgcgaccctttagcgcctgcaggtagctgtcgcgctcgttctcttcggggataaagccgtaggccccggtaaaggccggaatattgaagctcttcgaaccggaggtgaacaacgcccatggtccctgagcgacctcgctccacgggatatggcggtgttcgctccaggtcatgtccatatgaatttcgtcgctaatcaccctgacgccatgtttttgacacagggccgccatggtctccagctcctcgcgacgccagactttccccgttgggttgtgcgggctgcacagcagcagcagggtattctttggctccgccagcgccgcctccaggcggtccatatcgcagcgccaccgattatccttcaggatcaatggcaccggggcaatccgccgccggttagcggtgatggtgttatagaacgcatcgtaggcaggggtgtggaccacgacgccgtcgccttctttcgaccactggcggatggtttccgccaccatatagataaccgacggtccgtagaccacagattgcggatcgatgtcgctgttaaagcggctggcgtaccagtgggcaatcgccccgagaaacgcctcgttgcgccagcggctgtagccgaacaccccgtgggccagccgctggctgacggcgtcgagaatacagggcgcggtggcgaaatccatatcggaaatagtgaacggcagcagatcggcggcgccaaaccggtcggcgacatagtcccattgcgtgcaccaggtgccgtggcgatcgataggggtggcaaaatcaaacattggagcttccttagcgagcgccccctccgtagcggagggggactagtgggatcaggcctgcacggtattcatcagcgtggccatctcatcttttaccgactgtacctgcgggccaataaccacctgcagattatgctggttgagctgtaccaccccgatggcgcgatgggctttcagcgcggcggcgtccactttgctcatatcgtgcaccgacaggcgcagacgggtaatgcagttatccagcgaaacaatgttctctgcgccgccgagcgccgccagaatcgccggtacgttatacccggatttgccgatggtaccggcgacggctttctccacgctggcggcagtgtcgatgtcgcggcccggcgttttcagattgaagcgggtgatggcgaagcggaagatggcatagtagaccgcgaaccagatagccgccactaccggcaccagataccacttggtcgccaggccatgcagaatgccaaacaccacgaagtcgatgatattgccgtcggtgttgccgatggttaccccgagcaccgccatgatggtaaagccgagaccggtcagcagcgcgtggatgacatacaggaccggcgcgacaaacaagaacaagaactccagcggctcggtggtgccgccgaccacgcaggcgatgaccccggagatcagcaggcctttaattttatgtcggttttccggacgggcgcagtggtacatcgccagcgcggctcccggcaggccgccgaggaatgccggcattttaccctgcgacaggaaacgggtggcgctttcggcgaagccgtgggtcgtcggacagctcagctgcgcctggaagatggtcagcgcgccgctgacgctgtggccgcagacgtcgagagtgccgccggcttcggtaaagcggatcagcgccaccagaatatggtgcaggccaaacggcagcagcagtcgctcgccggtgccgaagatcatcggccccaaatccccggcgctgttgatcatcttcccgagggcgttgatccccatagcgaagactggccacaccagcgggatcgccagcccgaccagccccagcaccacggtggtgacgatcggcacgaagcgggtgccgccgaagaaggccagggcgtccggcaggcgaatgttatggaagcgttcatgcagcagccagacgataatcccggcgatcaccgccccgaggatcccggtatcgattgacggaatgccgataatgttctggatattgttggccttcaggatcgcggcgtcggtggtgggcagaatacccttcgcggtcagccagaagttgaccgccaggttcatgaccgcgtagccaacgaagccggcgaaggcggcgacgcctttgttctctcgcgccagacccagcgggatggcgatacaaaacatgaccggcaggaagctgaaggcaaaggagccgaccttgctcatccagataaagatggcctgcagcagcggcatatccagccacggcagcagagtcaaaacatcgtgactgcttagcgagctgccgatccccagcatgatcccgcaaaacgagagcaacgctacgggcagcatgaaggtttttcccagctgctggaaaaattcccataaggtgatttttggtgctgttttcgccgtcatagcacggttcctgattcataagtggtcgggagaactaatgccacggcaagataaaacgttttatcactttttagtgcgataaaaatcacatattcaagcgataataaggtttataaagatcgcacaatgataaaacgatttatcgacaggcaagggagtcagccagcaggttatggctatcgcaaaaaagatcaccatcaatgatgtggcgctggctgccggcgtctccgtgagtaccgtttcactggtactgagcggcaaagggcgcatctccagcgccaccggcgagcgggttaatcaggctatcgaacagctgggatttgtgcgcaatcgtcaggcggcctcgctgcgcggtgggcagagcggggtgattggccttatcgtcagcgacctgtcaaaaccgttttatgctgaattaaccgccggcctcaccgatgccctggagaggcaggggaaaatggtatttctcacccagggaggccgcagcggcgagaagatggcccagcggtttgatacgctggcggcgcagggggtggacggggtgattatcgccggggcgatcgaccgcgggagcgagctgcgcgagcgtgcggcggaggcgggggtgccgctggtgtttgcttcccgcgccagctatcttgacgatgtcgacctgatccgcccggacaacatgcaggcggcgcagctggtgacggagcatcttatccgccgcggccatcagcggatcgcctggctcggcgggcagagtgcttcgctgacgcgcgccgagcgggtcggcggctattgcgccaccttgctgaaatacggcctgccgtttcacagcgaatgggtgctggagtgcgagtccagccagaagcaggcggcggaggcgatgaccggcctgctgcgccagaatccgaccatcaccgcggtgctgtgctacaacaacgtggtagccaccggcgcgtggttcggtctgttacgggctggaagacagagcggggaagatggcgtcgagagctactttgagcagcgggtggcgctggcggcgtttgccgacgtgccggaggccgccctcgacgacctgcctctcacctgggtgaccaccccggcgcgggagatggggaaaagcctggcggattcgatgctgcggcggctggaagaggggactggcgagacgcgaaaccagattatgcccccgcggctggtgacgcgaaaatgagggagacggcgcgcgctggccgtctcctgtaccgataagttacggctgcggggcggcgtcgtcctgctgaggagcggcgtcatcctgctgcggctggccttcctgcggcgcgctgtccggcagcgaaggcgcttccagaccaaacatcgcggcaaagtcttgcagcggcattttctgtccgttcagcgtcacctggccgttcgcgtactgcagactgctgctgatggcgttatcttccatggtggtaatgcggaacatctggcccatcgccgccaggcctttgacctgctgatcggcgagtttggcggcatcggccggctgatagccttccagaccggcgatcttagtcataaactccgtcgccatatccactgggatcaccactttgccgtccagggactgcaccacgcgatccaggctgtccgccagggtctgcggcggagcggtcacctgggccggatctttcagcagaaccgagaggttgagggtgctttcgcctttggcattgcgccagctcagcggagagatggtcaccgacgggttgcctttgagcaggatcggcagcgcattgaacagcgtttcggtgagggcctgctgatacagctccggattctgcgccagctccggtttcgccagcagcgcctgagactgcgcgctgtactgctgactgaactggtgccacgcctgaccgtcgacgttatccactttcagcgtgagtttgccgctgcccatatcctgcccctgcagcttgaggctgttgacggtgtagttcacctggctgttcacgcctttgccgtcctgggtcagcgtcgagccgccgtccagcgccatgccgtcgatcagcgccagctctttgccttcgacgctgatggccagtttatcgagggtcattttttgctggccgatacgttcgttgaagctggccagctcggtggcgccgtcggtggtcaggttgacgaagcgcagctgtaccttctgattatattcgttgagcgcatcgatctgcccgctgccggcctggcccttcaggctgatgtttttgccgtcgcggtcggcgtcgagctggaactgaccgccgctgaaggtgactttctcatcgcctttagcgtagtcgagggcgttaaggacgatagccgactggctgtcgccgctgtaggcaatgcgcgtatcgacggtaaagggggtgtcgcctttggctatctcgaacagcgcctggctggcgtcgtttttcaccagcgtggtgtggacggaagccattgccggcgccagattaaaggcttttaacgaggccagcgggaaggggccatgatcgaccacttcgtcaagcaccacgctctgcccggcggccagccagccgttagcctgaccggcgatcggcttcaccaccagctgcagatggctgctgaacagcccgcgctggtagtcctgatagctcagctccagacctgactccggcgcgctgctgcgcagctgggcgtttgcctgctgcaccatatcggcgatccggccttccagctgtttaccagtgaaccaggcgccgcctgtccataccacgcccagcgccacgatgactcctgctgcgaccagcgattttttcatagcatttatccataaatgaagccaggcggagagaccgcctggctgagttatcaccaacagtaagcgcgacctgaaggggcagtcgcttactggagcttattgaaaacgcgcgccacgcggccgcggccgctgacctgcaccggcgattcactggcggccacgaaggccgactcgcccggcttgagggtcaggctctggtcgcctttgcgcagtacggcttcgccgtcgacgcagaacacgatcgccgcgcttgcctgggccagatcgctggcctcggcggagaggtcatgcagggagaaggcaaaatcttccaccgggatcgggaagtcgagttccgcgccgtgacgctgcggctgggtcaacagctcacccgccggtttagcctcgaacttgacgttagcaaccagctcaggaatatcaatgtatttcggcgtcaggccggcgcgcagtacgttatccgagttggccatcacctccagcgccaccccctgcagataggcgtgcggcgtttcagcaaacaggaacatcgcttcgcctgggttcagcttcactacgttcagcagcagcggggagaagaggccgctgtcgtccggatagaattccgcgatcaggcggattgtctgccacggttcgccttgttcacgggccagtacgtcgcgcagcacctgcagcgccttggccttttcctcaccctgcatatttagcaggctggcaaacagctggctcaggtgagtcgcgtccggctgctgcaggaaggcgccgattgccggatgcgcgctagccaccggctgcagcagggtgacaatctcgctgaactcgcgaaatgcattcatcgccaggaacggcgtcagggcaaaaaccagctccggtttgtggttcggatctttgtagttacgctcggcggcggagagcgggataccggcggcgttctcgcgggcgaaaccttcttccgaggcctgcttgttgggatgcacctgaattgagagcggctgagcggcgcacagtaccttaaacaggaacggcagttcaccaaagcgggcggcaaccttgtcgccgagcagagcggctttatccgcgtcaatcacctcgcgcagcgaacgcggctggccgtcggccgccaggatctgcgaactgctcttcggatgcgcccccatccacagctctgccatcggcagattgtccgggttggcgatgccatagagttcggttaaggcggtgtggcttccccatgcatagttctgcacggcgttaatcagcttttgcattctcaatccctgtttcaaacaaagtaaattttatcgccctattaaaccagcaaacggtggagaagcaactgctgaaagaaaaagtcgtccttgtctcagtttttgttaaaaaattgtgtaagattgttcgactcgcttttctacaggcacatggagtccctgcctgaaacataatcagccaaagcagtaagtgagagtacaatgtcgaataaaccgtttgtttaccaggatccttttccgctcaaaaaggatgacaccgagtattatctcctcagcagtgattacgtctccgtcgccgaattcgccggccaggaagtgctaaaagttgaccctcaggcgctgacccttctggcgcagcatgctttccacgacgcctcctttatgcttcgccctgcgcatcagcagcaggtggcggatatccttaacgatccggaagccagcgaaaacgataaatacgtcgcgctgcagttcctgcgcaactcggatatcgccgccaaaggtattctgcccacctgccaggacaccggcaccgcgatcatcatgggtaaaaaaggccagcgcgtgtggaccggcggcggcgatgaagccgccctggcgcagggggtgtacaacacctatatccaggacaacctgcgctactcgcagaacgcgccgctggatatgtataaagaggttaacactggcaccaacctgccggcgcagatcgatctctatgctaccgatggcgatgagtacaaattcctctgcatcgccaagggcggcggctcggcgaacaaaacctatctgtaccaggaaaccaaagcgctgatcaccccggcgaagctgaaaaattacctcgtcgagaagatgcgcaccctcggtactgccgcctgtccaccgtaccatatcgccttcgtgatcggcggtacctcggcggaagcgacgctgaagaccgtgaagctggcgtccaccaaatactacgatggcctgccgaccgaaggtaacgagcacggccaggcgttccgcgacgtgcagctggagcaggagctgctgctggaggcgcagaaccttggtctcggcgcgcagttcggcggcaaatactttgcccacgatatccgcgtgatccgtctgccgcgtcacggcgcttcctgcccggtagggatgggggtttcctgttccgccgaccgcaacatcaaagccaaaattaaccgcgacggcatctggatcgagaagctggagagcaacccggggaaatatatccctgagcatctgcgccaggccggggaaggcgaagcggtgaaggtaaatcttaaccagccgatgagcgagatcctggcgcagctgtcgcagtatccggtgtccacccgcctgtcgctgagcgggactatcatcgtcgcccgcgatatcgcccacgctaagctgaaggagcttatcgacaacggcgaggcgctgccgcagtacgtcaaagatcacccgatctactacgcaggtccggccaagacgccggacggttacgcctccggctctttggggccgactaccgcaggccgcatggactcttacgttgatctgctgcagtcccatggggcgagcaagatcatgctggcgaaaggcaaccgcagccagcaggtcaccgacgcctgccacaaacacggcggcttctacctcggcagcatcggcggcccggcggcagtgctggcccagcagagcatcaagagcctcgagtgcgtggcctatccggagctgggtatggaggctatctggaaaattgaagtggaggatttcccggcctttatcctcgttgatgataaaggcaatgacttcttccagcagatccagacctcgcagtgcgcccgctgcgtgaagtaacccaggccgcccttcggggcggcgctggtcgatgacaaacctgatttcgttagggtgagcgcctttctgccgggtagcggctttcgccttacccggcctacgaaaaacagcaatatcaataagttatgcagttctctgtaggctcgcgcaagcgtagcgccgccgggcaatcccgacgattgcattttgtcagcggtctgggccgcccctcggggcggctttttttatgtcgcttcgcggcacgaaccaccaaaacaacttatcaatctggccaatacttagtcttttaagcaggtgagctttgtcgctatgacgcacttttcatccaaggagaaagtaatgacaacgcatcgcagtgaaaaagactcgatgggcgccatcgaggtcccggccgataaactctggggcgcccagacccagcgctcgctggagcatttccgcatctcgaccgaaaaaatgcccggggagctgatatacgccctggcgctgaccaagcgggcggcggcgaaggttaaccaggatctcggactgttgacggcggagaaagccggggcgatcgtcgccgccgctgacgaagtgctggccggaaagcacgcgcaggagttccccctggctatctggcagaccggctccggcacccaaagcaatatgaatatgaacgaggtgctggccaaccgcgccagtgaactgctcggcggagaacgggggatggcgcgaaaaattcatcccaatgacgatgtgaataagagccaaagctcaaatgatgtattccccaccgccatgcacgtcgcggcgctgattgccctgcgggaaaaagtgatcccgtcgctgcaggcgctgcgggcgacgctcaatgaaaaagcggtggccttcagggatatcgtcaagatcggccgcacccatctgcaggacgccacgccgctcaccttaggccaggagatctccggctgggtggcgatgctggaccatagcctgaagcacattgaagccagtcagccgcatcttgccgagctggcgctgggcgggacggcggtaggaaccgggctgaatacccatccggaatatgccgtacgggtggcggccgagctggcgtcgctcagcggacagccatttgtcaccgcgccgaacaaattcgaagcgctggccactgtggatgccctggtccatgcccacggcgcgctgaaaggcctggcggcctcgctgatgaaaatcgctaacgatgtccgctggctggcctccggcccccgctgcggcattggtgaaatcgccatcccggaaaacgagccagggtcatcgattatgccgggcaaggttaacccaacccagtgcgaagctctgaccatggtctgctgccaggtgatgggcaacgacgtggcagtgaatatcggcggtgcttccggcaactttgagcttaacgtctatcgcccgatggtcatccacaacttcctgcagtcggtgcgtctgctggcggacggtatggcgagctttaacgagcactgtgcggtgggtattgaaccgaatcgcgagcggatcagtcagttgctcaatgagtcgctgatgctggttactgcgctgaatacccatatcggctacgacaaggcggcggaaatcgctaaaaaagcgcaccatgaggggctgactctcaaagcctcggcgctggcgctgggctacctgacggaagccgaattcgacagctgggtgcgcccggaagagatggtcggcagcctggctattcgctagccagccagaggtgcaggcgcgggataagcaatctcagcgactgcgcctccggtttgtagcgatactgcacattgtcggcatcatagttcagcagctcgccaatatccggtacgctgaccccccggctgccggacatcagggcgatcagcgggctggggcaggcgtactgtacctgtttctgctcgccggcgtaccagacgcgggcgatcggctggactttcaccggtcgttttattttcagccgcgcccgctgcggcagggcggcgatatcctgatactccctttccagtttgctctgccactgctccctggtccacggcggcaccgcccgcggcgcttgcaggcttttctccagcatcatcaacacctggtcgcgggtcagattcttgatgacgtgcttattggcccagccgaagcggatggtgctcgggtcgacgaggggcgtcagcgtgcggtaggcgcttagggtgatcaaccccggcaaatgacggtgtacccactcaaaacgggcggtggggggcaggccggagtcgacggtgacgatcttctcgaaggtggccttcagggcattgatatgctgaatacgcgccagcagatcctgctgctccgcggcggtaacctgcaggcagatagcccccggcaggcgtacggcggccttgctgctgcggttttccgattgctgctggataaacagatggctgtagtggcgcagggcgtgcgccagggccgtcttgccgatgtgctgcaccaccggaatagtggccagcggatcgtgctcggcatccttaccgatcgccggcagttcaaatacccggcccgccagcagacggcagtcacttaatgcctgctggagcgcctgcagctccagctcgatctggcgaaaggtattattcagacgttcaacgaggtcgtagctggccattattaccaccttagttacaacatactattagatttttgcagcatacccagcccgcggcttctgcgcaagttttattcaggcagaggtgaaatcaggcagctgatgatagaccggccagctaaagcagaagcgggcgccgccgagagggctggcctcgcagcgcacctcgccgcccatcgcctgggcgatactgtggacaatcgccaggccgaggccgcagcctcctgtcgcccggtcccggctggggtcaaggcggacaaagggctcaaacacccgctcgcgctcctcgggggcgattcccgggccgtcatcctcaaccagcaacgatgcgcgcgaaccctgcagcgtcaggctgaccgccacccgctggctgctgtagcgcagggcgttgttgaccaaattatccagcacccgctccatcagtcgcatatccagcgcgccgtagttaccgtgggtcagcgtcgccagggcgacctcgcgctgtgggttaaccatctggatatcctcgacgtgatcgctgatccaggcgggaaaatcgggagtcgtcaggctgagctccgtctgcgggcggtcgaggcgggcgtaggtcaggagctcttcaatcagcgcctccagctgaccgatatcgcggttcagcgcctgcgattccgcctcgctgagattctcgctcatctccagacggtagcgcaggcgtaccagcggtgtcctgagttcatgggcgatgccgtcaatcagctgctttttgctggcaataagcgcattaatgttatcggccatttggttaaaggccaccccgagccgctcgaagctggacatactgtcgaagtgaatgcgctcgctgaggtgaccttcgccaaagcgctgggcggccgtctcaatgcgcagcatgtcctgccagtgcgggcgcatccagataaacaccggaaaggccagcgagatagcaataaacgccatcagcgccacgtccagcaggcgcatctcatgcagaaaatagagatagggcaccggacccaccgacagcacataatggctgcggggaatgcgctgaataaaggtgtactgatcgtcgagggcgacgatatcgccggcgcgcaggtgctgcatcgagctttccgacagcttaaatttgctgatcggctcgatgtgcagatcaaacgataaattcaggtccagctctttaagggtcttgctccagtcgcgcggcggtatctcccgcagctcgctgcgcatcagatacagcgagcttttcatcaaatcgtcaagcgactgccgtccggcgcgctccgcggtaaatttatagaccagaccgaccagcatggtcatcaccagaaagcagacgaagagcagaagatagaactgcacgaacagctttttcattacattaccgcgtattcaagagaaacctgtctggcgccccaggggcatcttctgcgcgtcggggagtcaatgttatcgatatccccgggcgaggcgcggggaaatcatagatacgctatcaaagcagggtttatgccccctgacaatagccagcctggagacagaacggtgaaaaggtgacggtgtcactcgatgcggtgatttcttcacctcggggggagctgggcaatcgtattttgtgcgtcgatggatacgctactcacgataataaggaatgtctaccggataggtggtcgtcagactcagcagccgacagcgcaccagcttttccgtttcggcataccagtaagcaaactcgccggtggtctggtggtaaatcatctgatcgaggttggcaaacgggatcaccagcagcggcccctggcgaacgtggccgccgccggtttcaaagtgatgctgcccccaggattgctgggtatgttcatagcgatgaaggatcacctcgatttgcccgcgctgcggacagaggagtcgaatatcggcgttgtcgagggaaaaagcccagccagagagagaagtgaacagtgagagtgccaaaagtacaacgtatttcatcatgcaaaagtcctgtgttttcaggctttatgccactctggcagcggtaagtccttgagcacaatcatattgaggagttatgtgatggggttctgtacggctaattctattgatttagtcaatatgacaagttccggtgatgaatgtgcgcgccagggacgaacgcagcaggcagcaaacgtgataactttgccgccggcgagcgcgcaatgagcgggcccctcgcagggccgcagaagggccgcttagttatcccaggcgtgaggggcgaacaggtagcctttgttgcgaacggtcttaatacgatagggctccgtggcgttgtcgagcagttttttgcgcaggcgggagatagccacgtcgacgctgcgatccatcccatcataggtaacgccgcgtaaatttttcagcagtgcgtcgcggtccataatctgcccggcgtgggtggccaactcccacagtagatcgaaatcggcggtcgacagggcgacgttttctccgccaagcagcacctggcggttgaccgggtcaatggtcagcgagccgaaggagatggttttatgtggcgtgagcgttgaggaggcggatccggcgcctgccggagcaatatgctggcgcaaatgcagacgcagtcgcgcgaggagtaccgctggcggggtggttttcagaatataatcgctggcgcccatctccagggagaggatatggttcatatcgctgtcgagcgaagtcagcaggacaatcggcccttgccattgcccgcgcagatcgcgacagagcgtcattccgtccttgccgggcagcataatgtccagcagcaccagatccggtttctcccgcgcgatcacctcctcagcgcggtcgccgcgaggctcgaccaccacatccatatcatgcttgccgagataggcggcgatcagcgtgcctacctcagggtcatcctcaacaaaaacgattttattcatgtctattgcacatcagtaaaagaagtaacatacaccgcacttattttacccgccattactcttttataaacagcgttaaatccgctatgctgccctaacttattgattcactgttaaggcatacgggcatggggctgttaatcaaagggctgttgggagcgctggtggtggtgctgattggcgtgctggcgaaaaccaaaaactacgctatcgctggcctggtcccgctgtttcccacctttgcgctcatcgcccattatattgtcgccagcgagcgggggatcgaagccctgcgcgcgaccatcgtattcggcatgtggtcgattcttccctattttatctatctgctgtcactgtggtatttcaccgggattatgcgcctgccgttggcgctggcaggcgcagtgggatgctgggggctgtgcgcctggctgttaatcctcggctggagccgtttccactagcgcagcgggcggccgccgtcgacagcgaatgagcggccggtaacgtagcggctggtaaacaggtaatcgatgagatcgctaatctctttttcgccaggggcgattttcatcagcgatttatccagcgcctgctgacgataggcctcgtcgtcaccctcattaaacatgattagcgacggcgcgatggcgttgaccttaacctctggcgccagcttgcgagcgaaggagcgggtcatgttatccagggcggctttgctggcggcataggcgatatgtttgtcgctcccgcgctccaccacgtaatcggtgatatggataatgtcgctggcggcatggccgtggccgcgcagcaacgcctccagcgcatggttgagcagatagggggcgtggacgtggatctgcatcatgcggttgatgacggcgctcagcgggacgcccggcttttccgccatccagtcgctggcgttatggatgatggcgcgcagaccgtcggtgtgtgatttgaccgcttcagcgaaggtcagaatgccgtcatcgctgctaaaatcggcctgcaggcagagcgcgcccgcttcgcgcaggccgtcaatcgccggatagggcgtacgatagctgacgataaccggctggcgctgctgcagaaaatggtgtgccagagcgaggccgatgcggcggcctgctcctgtgatcagaatcgggcggggctgttgttcagccatgggtatctcctatgcgttctgcggcagggcgaccgcttaccccaccagcatccacgttgccggcaaagcggcaaccagcaataaaccaattagcgccacttcgcggcgtttgagcgaacgatcgtgctggtgcgtacgtcgggcgtacaaaaagaccagaagacccggagcgtaaagtaccaccgacaacagcaaatgcacaggccccgacgcgtataataaccatatgccataaatacaggcgccgatagccaccgctttatgcagcgggcgagtggcgattttcagcagaaaggcgccgaccagcagatagggcacgagaatcatctcggaggcaatggtcagcagcgtgccgtagtccgatccggtcagccagatcagcaccagcgatacctgaacgctgatattggtcaaccacaatgaggcggaggggcgttgttgctattctgacgggcaaacaggcgcgggaaggctttatgagtggcggcgaggaaaggcacctccgcggccatgatggtccagctgagataagcgccgcacaccgacacgatcagcccggcggcaatgacgatctccccccacgaccccatcagcctgaccatcagtcccgccatcgacgggttgcgcatttcggccagttcgctgcgcggcacaacgcccagcgacagcagggtgaccagcagatacaccgcgagggctgacagcaccgccagcagcgtcgcgcggccaacgtcgcgcttgtgtcgcgcccgcgcggacacgactaccgcccctccacgccgataaacacccacagggtgatcagcatggtgtttttgacctgttcccataccggcacgcccagcgccaggccgctaaaatcgaggcggaacgtatccagctgaaaggccagggcggcgagcgcgacaaaggcgcccagcggcagaagcttggcgagggtggccaccaggttaatccccgctgccgtctggacaccgcgcaggaccagaaagtggacgacccacagcagaaccgacgcgccaacgatagactgccaggtattaccatcgccaaacaggcgcagctcaggggtatcggtgaaaaaactgagcgccgaaaagacgataacctgataggagacattggcgatcaccgcgcacagccagtatccccaggcggagcagaagccgatcagttcgccgaatccttcgcgagcgtaggtgaagatcccgccgtcgaggtcgggacgaatacgggtcaacagcagcatggcgaaagcgagaaacaggatcccgacgccggtgatggcccagccaatgagcagagcggaggggctggccacggcagccatattttgcggcaaactgaatacgccagcgccgagcattgagctaaggaccagggcggtcagggcgctcaggcccagtttcttttccattgcattcccgaggtgaaaatggctgttccagaatatttattttgcgaaatcgcataaaaatggaggattgcgctaaggcgcgggattttacggagtgtccgggggccatgcaatggcgggggatgaaaaaaaatgaaaaggcggcaatgcgccgcctttttagccagccagcagcgattatttgtacaaatcggcgctgatggtgatgttgccgccgcgttcctgccactggcgggtgatgtggtagtacttcgcccctttcttcgccgcgcgtttcgccgtctgataggagatttccgtcatgttgccgtagttgccggtgaactggatgttatcgaacggcaccatttgcgccgcagtcactttgttcacttcttcgaccttagtgccgttcggcagagtgacagtgtaacgtccacctttcgaagactgagtctcaaagaaacgcccaacgccggtacccgaacccaccgcggcggtggtggcaacgcccggaatttccacgttcttcgccgcttcgccgcctttggccagcgctgcgcggccagcttcagagtcagccgggatagcgtccgggctctgcagcacgcgtttttcagcatcttttttgtagatataagcggtaatgcgctggttgccgccctggttggcgtcaacctggcggacgataaagaacgcataggcgccttttgctttcgccgctttggtgatggcgtcgttgacttccggctggctgcgatagaagccctgaacggtgacggtgtcgtaaggcatcagctcaacggcctgatctttcggcaactccatcacgccattgataatgcgattcttcggcgcatccgctttcggcgcgtcttctttataaaggtcagccgtgacgcgccagttgccgccattgccgtagtccgacgtgtcgacaacatagaatgaggccgcgccgtctttgtcggctttgcgcgatactgcctgtaccgcatcgccaatggcattaaaccggccggtgacgacaacgcgatcgtagggcttcagcgcagccgcctgctccggggtcaactcggtcgctgcatgggcagacaacgtggcggttgtcaggagagcagacgccaggagggtgtttttaagcttcataaaaataatcctttgccttgcgcaaaccatatactggtgttgttgttgactgaaaacgtttgattattgcatttaatcgccgtgactgtctgcgtcaatttttgcttgccgcccgaatcgtatactacggaaagataacatttttcgatatgttgaaaaaacaggcgcttgaccagcaaaaacgataatcaataccacttttattagttaatgtaatgttaacacaatgatctcaatggcgataaatggcgttttataccgcaggataagcggattatcaggcctgagcggcaaattcaggtaaatattgctgcccggacccatctgagctgacaataagcaataaaatcaaaatttgtgttttatcgcagtagatcacaatcggtattttcagtaggttataaaaagtttgttactgtttcattttgtagacagcgaaagatggcgacgaagattttgccgtcctggcgttgttgggcagaaaagtaaaccatcatcaaaaaccgatggaagggaaaactatgcgtattggtgtaccacaagaaaggctagcccaggagacccgggccgccgccacgccgaagaccgttgagcaattgctcaaactcggctttagcgtcgcggtagaaagcggcgccgggaagctggccagctttgacgatgaggcctttgccgaggcaggagctgaaatcgtgaccggcgacgaggtatggcagtctgatgtcatccttaaggtcaatgctccgaatgacgatgaaattgccctgctgaatccggggaccacgctgattagttttatctggccggcgcaaaacccgcagctgatggaaaaactggcggcccgtaatatcaacgtaatggcgatggattccgtgccgcgtatttcccgcgcccagtcgctggatgcgctcagctcaatggccaacatcgccgggtaccgcgctatcgttgaagcggcgcatgaatttggtcgattctttaccgggcagattacggcggcaggcaaggttccgcccgccaaggtgatggtcattggcgccggggtagccggtctggcggcgattggcgccgccaacagcctgggcgctattgttcgcgccttcgatacccgtccggaagtgaaggagcaggtgcagagtatgggcgccgagttcctcgagctggactttaaagaggaagcgggcagcggcgatggctacgccaaggtgatgtctgaggcctttattaaggctgaaatggcgctgttcgccgcgcaggcgaaagaggtcgatatcattgtcaccacggcgttaatcccgggcaaaccggcgccgaagctgatcacccgcgaaatggtcgactccatgaaatcgggcagcgtggtggtcgatctggcctcgcaaaacggcggcaactgtgagtacaccgtaccgggcgaagtggtgaccaccgccaacggcgtgaaaatcatcggttacaccgatcttcctggccgtctgccgacccagtcctcccagctctacggcaccaacctggtgaacctgctgaagctgctgtgcaaagagaaagacggcaatatcgttatcgatttcgatgacgtggtagtgcgcggcgtgaccgttgttcgcgaaggtgaaatcacctggccggcgccgccgattcaggtctccgctcagccgcaggccgcggcgaaaaaagtggaagcgccgaaagaagcggtgaaaccggcgtcgccgtggcgcaaatatgcgctgatggcgctggcgattattctcttcggctggctggccaacgtggcgccaaaagagttcctcggccatttcaccgtcttcgcgctggcctgcgtggtgggttactacgtggtgtggaacgtctcccatgcgctgcatacgccgctgatgtcggtgaccaatgccatttcgggcattatcgtggttggcgcgttgttgcagataggccacggcggctgggtcagcttcctgagctttatcgcggtgctgatcgccagcattaatattttcggtggttttaccgtgactcagcgcatgctgaaaatgtttcgcaaaggataaggggtagcacatgtctggtggattagtaacggctgcatacattgttgctgcaatcctgtttattttcagcctggcgggcctgtcgaaacacgaaacgtcgcagcagggcaactatttcggcatcgccgggatggccattgccctgatcgctaccatcctggggccggacgccggcaacgtcggctggattattcttgcgatggtgatcggcggggcgatcggtattcgtctggcgaagaaggtcgagatgaccgagatgccggagctggtggctatcctgcacagcttcgtggggctggcagcggtgctggtgggtttcaacagctacctgcagcatgaaaccggtatggagcaaattctggtcaatattcatttgaccgaagtgttcctcgggatcttcatcggcgcggtgaccttcaccggttcggtggtggcgtttggtaaactgcgcggcaaaatttcctccaggccgctgatgctgcccaatcgccataagctgaacctggcggcgctggtggtttccttcatcctgatggtgatttttgttcgctctgacagcaccggcacccaggtcctgtgcctgctggtgatgaccgcgatcgcgctggcctttggctggcacctggtggcctctatcggcggtgcggacatgccggtggtggtctcgatgctcaactcctactcgggctgggcggcagcggcggcgggctttatgctgagtaatgacctgctgatcgtcaccggcgcgctggtgggctcttccggcgccatcctctcttacattatgtgtaaggcgatgaaccgctcctttatcagcgtgatcgccgggggcttcggcaccgatggttcctccagcggcggcgatgaagaagtgggcgagcatcgcgagattagcgccgaagagacggcggagatgctgaaaaactcgcactcggtgatcatcaccccgggctacggtatggcggtggctcaggcgcagtatccggtagcagaaattaccgagaagctgcgggcgcggggtatcaaagtacgctttggtattcatccggtggccgggcgcctgccggggcatatgaacgtcctgctggcggaagccaaagtgccttacgacatcgtgctggagatggatgagatcaacgacgatttcagcgacaccgacaccgtgctggtgatcggcgccaacgataccgtcaacccggcggcgcaggacgatccgaagagcccgatcgccggcatgccggtgctcgaggtgtggaaagcgcagaatgtggtggtctttaagcgttcaatgaacaccggttacgccggcgtacagaacccgctgttctttaaagagaacactcatatgctgtttggcgatgctaaagccagcgtcgatgcgatcctgaaagcgctgtaatgtaacataattgttttacaacgtttgtttataagccgtctcctgtgagacggcttttttatatgcagggggatgcctggaattgttcataaaataagcggtaagaggtgatataatgttccggttcttacatcagacagaggatattatggataccgagttaaccccaacgcagatggccatcgaattcttacgccgcgaccccaccgtcatgaccccagcgcagtatctgaaaaaacttaaactgctggagctggagtttgctgacctgatggcgctctcctcgctggagctgaaagaagagatcgatctggcctggcgtctgggtatccactaagccattctcgctggacagcgacaggggccgccaacggccctttttttgtgcctggctggcagcaagcaaaaaaatcccccgcgcggcgggggaagatgagcggtggcggttaatcgtcgtcgtcgtcgtccagttccaccggcgtctggtaggcctccggtttcagcaccagcaggtcacagcgcaggtggtcgacaacctgttccgcggtattgccgaggaacgccgccgacaggccggtacgtccgaccgttcccagcaccacgatccccgcctgcagatgctcggcgaggtccgggatcacctcttcaggcagtcctttttcgacgtgggtgaatttttcatcgatgccaaacttctgccgcagcgctttcatcgccagcagatgctggccgcggatcgcgtcgttgtagacgctgggatcaaaatccggcagttctatcgcgatattgatcggcgtcaccgggtaggcaccgatcaggtgcacttcagtgtggttgacttcttccgccagcgacagcgtctcgcgaaccagcttctcgttaagggtgttgtgataattctcttcgctggcgagattgacggcgaccagcgctttgccgccttccggccacggctggtctttgaccatccacaccgggcaagggcatttacgcagcagatgccagtccgtcggggtaaagatcaccgcctccagtttgtcgtgctggtgggccatcttcagcagcagatcgtgtttctcactgaccacctcctgaataatcgcttcgaaggggcggttgtgccacaccactttcacgtcaatcggcacgcccgattccaggtagaatttcgcctgctcgcggatccaggccgttcgttgggcaatgacgccctggcgcattgccgtccgctcgtccggcgacagcagggtggtcatttcataggaaaaatcatagatcggcaaaaaggctttgatgcgtccaccaatccgttggtgcaggtacaccgctcgccttagcgccggctggtcgtcctggttaggatcgattactaccagcatgctctgatacttcgccatacagggtctccttacaactgcagctaccgtcagttattaaaaagataacctatatggatgaattgaaacaggggaggagcctggtcagatcaacaaatctgaaaaaattgccgatcgtgaccagggattgcgcagagattaagcgacgttgcgcgcctgcccggccagctgggccagcagatcgctgttttcaatagtgatatatttgcctttcaccgccagcatgccgcttttctgaaaacggcccagcagacggctgatggtttcgacggtgaggccgagatagttgccaatatcgccgcgggtcatggtcagccggaactcacgtggtgagaagccgcgctgggcgaaacgacgagaaaggttatagataaacgcggccaggcgctcttcggcattctttttggaaagcaacaggatcatatcctggtcgcctttaatctcaccgctcatcaggcgcatcatctgctgacgcagattgggcatttttccggaaagatcgtcaagagtttcgaaggggatctcgcagaccattgaggtttccagcgcctgcgcaaagctcgggtgcagaccggtgccgatggcgtcaaagcccaccaggtcgcccgccagatggaagccagtgatctgctcatcaccttgctcggtgatggtatagcttttgatggtcccggagcgaatagcgtacaacgacttcagctcatcaccggctttgaacaaggtttgacctttctggataggctttttccgctcgataatattatccagctgatcaagctcatgctcgttcagagtaaaggggatgcagagctggctaatgctgcaatcctgacaatggattgcacaaccgccagactgaatgcgtcgaataattcgcttctcagggatcatatgtctgctcaggccttaattgatattggtcaattttaacatctttttgatcagcaggtaagtcttcaggcccggaaacacgtaatatcagcagggtaaatcaaatcgactgtgtatctatttgattaaaaacagattattacgccacttttgattgtaaaattacctgaaaattccagaaaaggcattttcagtcaaagcaacagatagccctcatgacgcaaaagccactctttacgctgtacgccgccggcatagccggtcatggtgccgttgcgcccgatgacccgatggcagggcaccacgatactcaccggattggcgccattggcggcgcccaccgcgcgcgcggcgccgggacgaccgagcgcctcggccagttggccgtagtgcatcacctggccacaggggatatcgcgtaacgcctgccagacctggcgctgaaaaggggtgccggcggtggcggtaggcagagtctcgataatggctaaatcgccggcaaaatagtcgctcagcttactgctgagaccgccgggattgcggcagtcgacgcgctgatagccttcccggcgatagtgtacgtcgagcagcgtttccatccgatcgcggtgctcgtcccactcgacagcgcgcaaattaaactgttcgtcgcaaagcacccacaacggccccagcggggtatccattttatcctgcagcaaggtcaacatcgtttctgtcatccaccatcgtacatgagaggcacacgataccacgcgctgacggcagtcaactatactcccaaaaggtaaaaccgcatcgccagatagcacggcgggctatccgccgtggaggcattctgcgatcgccacgatgatttatttttggatcgatcctggcgggttaccggacagggtttttgctacttttaagctgacgacgtcggtcctccgcgccgctgtgcgcgctcgggaaagtgctaccgcgtcggcgcggcgcggttaataactcagaggtggagctatgcaatatatactgactggcgtaatcgtactgatcttcagcggtctggttattcatggtatgtcgctgttgcttgagcgaggatatcgcgcgcttttcggcatattcgccggagccggggaagcgacccgtaagttcaaagtgaagatatcgcgttaagctaaggcggccgtccctggcgcatcggtgggttaagacagccgcggatagatgccagggccgatcggcagtcccaccagataccagcccaccagcaacagcagccagacggcgagaaaaatcagcgggtaagggagcaccagcgagtagtaggtgccgaggcgggcatccggccggtagcgctgtagaaagccgagaaacaacggcacaaacggtgacaccggcgccagcggcagcaccgatgaatcagcgatacgaaacaggatctgcgcaaacgccgggtgaaagcccaacagcataaacattggcacgaagatcggcgccagaatcgaccagatggccgagccgctggcgataaacatacacagaaaagccgacagcagcgcaaggccgacaaacgccggaacaccgttcatgcctgaactctccagcaggtccgtcagcccgacggccataaacttgcccatgttgctccagttgaacatcgccacgaactgcgccagcgggaagaccatcacgataaacccggccatctctttcatcggctcaatcatcaactgcggcaggtcggcctggcggcgaattttgccggtggcgatgccgtatgccagcgacacgacaaagaagaaaaagataattagcggcacgatgcctttgataaacggcgagggcatgaccgtatgctgaaccggatcgcgaagaataccgttttcggggaccaccatcagggcgatgaccgccacgaataccagcgtcgccacgccggcgatgcgcaggccgaaccgctccccgggcgtcagcgtctgcagcttttcatcacgactgccttgccactggcccagccgcggctcgaccagcttatcggtgatcagtccgccgacgagcgtcagaacgatcaccgaggtcgccataaagtaccagttgtcgatcacgctgacgtgcaaagaggcatcgatggactttgccgcctcggtgctgatcccggagagcagcacgtcggtggtgacaatcagtagattggcggtaaagccgcagcccacgccggctatcgccgccagcagaccagcgacaggatgccgaccgacggcaagaaacatcagcgctcccagcggcggcataatcaccagcgccgcatcggaagagatatggctgaaaaaggcgataaacagcaccatatagctggcatagcgggcgctgacgtgcgaggccatcttgaccatcaacgccggtaacaggcccacccgctcggcaaagccggcgcccagcaccagggcgaggatcgcccccagcggcgcgaaaccgctgaagtttttaatcacgttcggcaaaaaccagtgcaatccttccacgctgagcaggtttttgaccaccacccgcgaaccgtcagttgggttttgtaccccaacgttgagggcggagaggattgccgtggcagcgatcagcacggcgatgagatagataaacagcaaaaacgggtgcgggaccttgttaccgatcttctctacccagccatagcgctttccgccgggggaagatgacggtatggatgacatactcatgggcattcctctgttgtcgttgttgtgttgggcaggcctgctcccctactgccggcggttattatgggcggtgcgtgccgcgatccggtcagcgttggccaggagtagcctctaagtggttatcgtaaaacggacggactcacctccgccgggatcgggcaacgataggggcgttcggccagtacctgcctgagctcttgctggctggcctccagcagggcgctgtcgctgaataaacggatggcggtcgccgcgaggactttccccgccagcaacatccctttatgggcaatggaggttctgccctggctcaccagctgccagctgtgcagcggggtacccaccgcgaagcacgggctgaagcactgggccaccggcgctttccagctaacatcgccgacgtcggtggatccggcgaggacgttatccgtggccgcccagggcgccacctcatcaatcagcaaggtgtcgcggtggcgacgagcgaacgttttgccttcctcgccactggtgccggcaatattgttcaggctgttgttaatatcattggcgctgagagcggcgcggatcgccgcggcaaaagcgcgttcctcgtcgctccaggcgggggtaccgtaatgacagaccgcctgatacatcgccgcctcaagcgtgcggttgggcagatagctggagcaggctttttcaaagcggcagctgacctgggtctcggtcatcagcgcggccccctgggcaatcttctctatgcgggcgaagatttgctcagcgtcggccatctccggcgcgcggatcaaatacagcacttccgcctgcgcctgcaccacgttgggcgagacgccgccggtatcggtaatggcgtaatggacgcgcgccttctcgatgatatgttcattgaggaaattgctgccggtggtcatcagggtgacggcatccagcgcgctccggcccaggtgcggcgaattagcggcgtgggccgcggtgccggtaaatcgccatgccgcctgaatgttggcgagggtgcgggtgctgaacatcccggcccaggcttccggatgccaggtcagcgccgcatcgacatcatcaaacaacccttcgcgcaccataaaggtttttcccgaaccgccttcctcgccgggacaaccgtagaagcgcagagtgccgctgtcgccgtgctgctgcagccagcctttggcggcgaccgccgcggcgaatgccgcggtgccgagcagattgtgcccacagccgtggccgttggctcccggtgtcaagggcgtcggttccgcgctgtgggcctgctggctgagtcccgccagggcgtcaaattcgccgagcagggcaatgaccggttggccctcaccgacgctggcgataaaggcattcgggatcccgccggcatcgcgggtgagctgaaaaccttccgcctccagggcgtcggccagtcgttgggctgaccagaactcctcaaagcgggtctccgggtggtcccagatgtcgtcggcgatggcgcagtaagtgtcgcgttgtgcctcaaccacctcgtccacaaactgaaaaatggcttccattacaccccccgctgccagggaaagttaagcgcgacgcgcgccagggtttcgaccgctaccgccatcacgctctcgtcgaagtcaaacttttcgttgtggtgaccggcgctgagttcagtgccgaaaatcatgtacgaggcgaggccgccgcgcgcctggacccgggccatcatcagggtggcgtcttccgagcccgccggggcggcgatgcgatccaccgcctgttgcacgccgggcacccgggcggcctgttcgcgcagatagtccacccacgccggcgacggtgcgctggcggtcgccgcgcccatcatgcgcagttcgtagcgggcttcgtacatcgccgcagccccggcgacgacgtgctgcgcccgctcgaacacgtactgattaatggcttcgctttcgccgcgggtttccacttttaacagcgcggaagagggcaccacgttgcgcccggtaccggcctgcatcaccccgacgttgacccgcgaggcgccggcgctgtgcggcgggatggcgtgcaggccaagggcggcctgggcggcggccagcagcgcgttgcgcccgtcctcgggcttgccgccggcgtgggcggccacgccgctgaactgcacgtcgaatttggtggtggccataaagttgtctccaccgcagacgacggtacctgccggcacgccggtcccgatatggatcgccgtgaaataatccacgtcatcaaccacgccggcggccaccatcgcgcgggcgccgcgggtaccctcttcagcaggctggaaaatcagtttaatgacgccattgagctgggcggcatactgcttgagcacatgcgccagccccagcccgatggcggtatggccgtcatggccgcaggcgtgcatcatgccggcgttgcaggaggcgaaatgatcgcgatgggggcggtggctatcgtcatgctgttcgttgagatcgagggcatccatatcgacgcgaaaggccagggttggcccgggccgcccggtgtcgagcgtggccaccacgccggcgaaaccaccttcaaacgccggcagccagcgctccggcgcgccctgttcgcgggcgcgttcgaaagcccgggccagggtctcctcgtccggcagccccatccggctgtcggcatcgatgacgtcgcggcctagcgccagctgatagcctagcccgtcaagaatatccgcgaccttactggcggtgcgaaactccagccagccggattcagcgtgcaggtgaaaatcacggcgccattgggtcatggagggcgccagctggcggaggtattcatcaagttgcggcatagcttatcctgtcataagtaaaaaatgtgacggcgttcacgatgtgatagcttttgtttatcactgacgcgctacaggccttaacacccttaacctgccacagcctgatggattacagtagatgtcattttcttctgtctgataatcaacggttatcactaaaagcatggcatttcagattaaatttcatcaaattcgcgccttcgtcgaagtagcccgggaaggcagtatccgtggcgccagccgggcgctggcggtctcgcagccggcgctgaccaaagcgattaaagagctggaggaggggctttccgcccagctgttcgtccgccgcagccagggggtggcgttaaccgacaatggcgaaagtttttatcaacatgcgagcctgatccttgaggagctgcgggcggcgcaggatgaactgctgcagcgccaggggaacaggccgggcaaattaatattggccttggcgccagcgtcgcccggtcgctgatgccgtcggtgatctgccgctttcatcagcagcatccgcaggtgaaggtacggatcatggagggtcaactgctggcgatgattaatgagctgcgccagggggagctggatttcaccattaatacctattaccccgggccgtacgaccatgagttcagctttgagaaactgtttgagaaaccgttcgcggtgttcgcccgcgcgggccatccggcggcgcaggccacctcgctgggggaattgatggatcaccactggaccatgccgacgccgcgcggcagctacttcaagcagctgcaggaatgcttcgaacagctgggacgggagccaaaggtggggatcgtctgcgaaacgttctcatcctgcatcagcctggtggtgaaaagtgattttctcagcatcctgccggtggagctgggcaacgacccgctgatggccgacaaactggtgatgatccatatccgtgaagtgttacccaccgccacctattatctgatccagcggcgcgatacccggcaaacgccgctcacggcgtcgttaatcaccctgttccgccgccagagccgacaattgtttccttaatcgtccgtcgcgctcactttgccagcgaacgcggctaaacgcgttgagaggggagcgcgaggcggctatagtagctggcgacagccgctggaggagagcccatgaaccttgatgacaaatccctgtttcttgacgccatggaagatgtccagcctctgaaacgtaataatgacgtgcactggcatcccgggcgtaacagccgggccccgcaacgcgtcgataccctgcagctggataattttctcaccaccggctatctcgatatcgtgccgctcgccacgccgctggagtttaagcgagaagggctgcagagcggcgtgctggataagctgcggcgggggaaatacagccagcaggcgagcctctccctgctgcgccagccggtggaacagtgccggcagatgctcttcgcctttatggtgcaggcgcagaaagaggggttacgcaatgtgctgatcgttcacggcaaaggccgcgacgaccagtcccacgccaatattatccgcagctatctggcgcgctggctggaagagctgccggaggtgcaggccttctgcgccgcgcttccgcatcatggcggcagcggcgcctgctatgttgcgctgcgtaaatcggcgcaggcgaagcaggagacctgggagcagcacgccaagcgcagtcgttagcgcagaagcagcgtcagctcgcgggcggctttttgcagctccggcagcacgcgctcgatcatctcgcgggccgtcatctggcccgcatgcaccccgacgttgagcgccgcctggacctgcccctgagcgttaaacagcgggaccgcgagggagcgcagccccatctccagctcctgatcgttgagggcatacccctgctgatgcacccgtttcagttcggcgcgcagcttcgccaccgaatccaccgtctgtggggtatagcggatcatggtcacccgggccagcatatcgttgagcttctcctccggctgatggctcagcagcacccggcccatcgaggtcgcccacgccggaaggcgactgccgatatccaggtcgatggtcataatccgcgagctggaggcgcgggcgatatacaggatatcgtcgccgtcgagggtggcgatggagcaggactcattgagcatttcgctcagatgccgcagcaccggctgcgccgaacgcgccagcggcgtcgaggccagccaggcgtggcccagcgccaggatccgcggccgcagctggaaattcttaccgtcttcggcatacacgaaccccagcttgctcaaggtatacaggcagcggcgcaccgcggcgcgcgggatgccggtcttctgactgatctgcgagatagacagcaggggccgctgcggcgtgaacgcctgaatcacctccagaccccgcgccagggaggccataaagttaggatcgcctttaaacggatcgccgtcgccggtcagtaaatcgtctggatgcttgtccatttctgttccccatatttgccatcgatcacattctttcgcaaaagataaccgatgttcgattatcgcaccatatttcgattatcgcccttgaccgacatcgttaagcgggtcacattttgtgcgaacaacgaataaaagtgcgattaccgcacatcactggagcgacctgatgattgataaaagcgtatcgacgctgagcgaggccatcgccgggatccacgatggggcgactattatgatcggcggctttggccccgccggccagccgacctttctgattgacgccctgattgaccagggcgctcgcgacctgaccatcataaataacaacgccggcaacggggaagtgggtctcgccgcgctgctcaaggcgggccgggtgcgcaaaatgatctgctcctttccgcgccaggtggattcccagattttcgatgatctctaccgtcgcggcaaagtggagctggagctggtgccgcagggcaacctcgcggcgcggatccaggcggccggcgccgggctgggggcggtgtttacccccaccggctacggcacgccgctggcggaaggcaaggagacacgggaaatcgacggtcgccactacgtgctggagtacccgatcaaagccgatttcgcgctgattaaagcccaccagggcgaccgctggggcaacctggtctatcgcaaggcggcgcgcaactttggcccgatcatggcgacagcggcgaaaaccaccatcgtagaggtctcgcagctggtggcgctgggcgacctcgatccggaaaacatcatcacccccggcattttcgtccagcgcgtcttctcgctggaaaacctgactgccgcacaacgcgcctgaggagcccgacatgcaaaaactgacccgtgacgaaatggcccagcgcgtggcccgcgatattcccgaaggcgcttacgtcaacctcggcatcggcctgccgacccgcatcgccaattacctgcccgctgacaaagaggtgttcctgcacagcgaaaacggcctgctggggatggggccgaaaccgcagcccggggaagaagatcccgagctgatcaatgccggtaaagagtatgtcaccctcctgcaggggggctgctatttccaccacggcgactccttcgccatgatgcgcggcggccatctcgatatctgcgtgctgggggcctatcaggtttccgccagcggcgacctcgccaactggagcaccggtgcgccggatgcgatcccggccgttggcggggcgatggatctggccatcggcgcccgccaggtatttgtgatgatggaccacctgacccgtgacggcgagtgcaagctggtggcgcagtgcagctacccgctgaccggcgtcggctgcgtcagccggatctataccgacctggcggtgatcgacatcaccgaccgcggcccggtggtgcgggaaatctttaacggcctctcttttgaagagctgcagcgcatcactccggtggcgctgacctttcaacaactggcggaaagcgcgtaaggaacctatgatgaatcaggcatttatctgtgatgcggtgcgtacaccctttggccgtttcggcggtgccctggcgacgatgcgcgctgacgacctggcggcgctgccgctgaaagcgctgctggcgcgcaacccgggactggatccctcgcgcattgacgatgtgatctttggctgcgccaaccaggccggggaagacaaccgcaacgtggcgcgaatggcgctgctgctggccggcctgccggagagcgtgcccgggagcaccatcaaccgcctgtgcggttccagccttgacgcgatcggcgtcgcggcgcgggcgattaaaagcggggagacgcagctgatgatcgccggcggggtggagagcatgtcccgcgcgccgtttgtgatggggaaagcggagagcgcctttagccgcagcatgcagatggaggataccaccatcggctggcgctttattaacccgcagatgaaagccctgtacggcgtgcattccatgccggagacggcggaaaacgtcgccgatgagtttgccatctcccgtgccgatcaggacgcgttcgccttacgcagtcagttgcgtaccgccgcggcgcaagaggcggggcgtttcgccgatgagctgatcgccgtccaggtgccgcagcgcaaaggcgagccgctgctgtttagccgcgatgagcacccgcgcagcacctcgctggaggcgctggctaaactgcgcggcgtggtgcgcgccgagggcagcgttaccgccggtaacgcctccggggttaacgacggcgcctgcgcgctgctgctggccagcgagacggcgctgtcggccaacgatcttcagccgctggcccgggtggtcggcgtggcgacggcgggcgttgcgccgcggatcatgggttttggcccggcgccggcggtgcgcaaggtgctggcgcagaccggcctgacattaggccagatggatgtcattgagctgaatgaagccttcgccgcgcaggcgctggcggtgacccgtgatttgggcttaccggacgatgccgcccacgtgaaccctaacggcggggcgattgcgctgggccacccgctcggcgcctccggcggccggctggcgatgaccgcggcttatcagctgaaacggaccggcggtcgttacgccctgtgcaccatgtgcatcggcgtcggacaggggatcgccctgattattgaacgtgtttaaggagccagaatgagtttgttgaccccgatgctgcgcagcagtccgctaaccgactggttcagcgacgcgcagcgggtgcagggcatgctggattttgaagcggcgctggcgcaagcgcaggccgcctgcgggatggtgccgccggaagcggtcgggccaattgtggcggcctgccgccacgaagccatcgattttgccgcgctgggcgaggcggcagtgggagccggtaatctggccatcccgctggtgaaacagctgacggcccaggtaaaagcgcgagatcccgaggctgcgcgctacgttcactggggcgctaccagccaggacgccatcgacaccggactggtgctccagctgcgcggggcgctggatgccgctgagactctgcttgagcagctgttggcggccctggcactccaggcggatcgttatcgcgataccgtgatgccgggacggacctggatgcagcacgcgctgccggtgacctttggcctgaagctggcgggcaccctcgacgcgctcctgcgctggcagcagcggctgcgcgagatgcgtccgcggctgctggtgctgcagttcggcggcgccgcgggcactctggacgcgctaaaagagaaagggccggcggttggcctggcgctggcgcagatcctcggtctgtcgctgccggatactccgtggcacagccagcgcgatcggctgctggaggcgggcgcctggtttgccggcgtctgcggcacgctggggaaattcgctaacgacttttccctgctgatgcagaccgaagtggctgaggtgggcgagccggtggcggaaggtcgcggcggttcgtcgacgatgccgcataagcgcaatccggtggcctgcgcggcgatcctgaccgccgcccagcgtacgccggggctgatggcgacgctctacgccagccaactccagcagcatgagcgggcgctgggcggctggcaggcggagtgggagaccctgccggagctaattaccctggtgggcggggcgttggcgcaaagcgaggcgctggtgcgcgacatgcaggttttcccgcagaaaatgcgcgccgatctcgatatcacccatgggctgattatggctgaggcggtgactctggcgctggcggaattcattggcaaagccgaggcgcatcatcatatcgaggcgctgtgccgccaggcgctggaccgtcactgcccgctggtcgatctgctcgcggctgacccacaggtcagtcagtatctctctcgtgaacgcttaaccacgctgctggacccggcaacggcgaccggcagcgccgaacgctttgtgcgccaggtgctggcgcgttatcaggagcaacgtgatgaatcttgattatcaactcgacgggccggatggcgcgccggttatcgtcctctccaattcgctgggcaccacccgggcgatgtggcagccgcagatcgaggcgttaaccgcacatttccgggtgctgcgctacgacacgcacggccacggtaaaacgacgaaaaatggcaaagtgaccctcgcccagttgggtgaggatgtgattgcgctgctcgatcacctgaatatcgaccgcgcctggttctgcgggatctcgatgggcggtttgaccggcctgtggctgggacgctttgcgccggagcgttttcatggtctggcggtcgccaacaccgcggcgcgcattggcgatcaggccagctggctgtcgcgggcgcgggccgtacgtcaggaggggatggcggtggtggccgccggagcggcagaccgctggtttacccacgcgtttcgccagaaggcgccggaggtggtcgaggcgctttgtcaccagctgacccataccgatgctgaaggctatgccgcctgctgtgaggcgctggccgccgccgacctgcggggcgaagtggggcagatcccgctgccgacgctaatcatcgccggggaaagtgaccctgtcaccacggtcggtgacgctcatttcctgcagcagcagatccccgcctccgaggtggtggttctggcggcatcgcatctgtctaacattgaggcgccgaaaagctttacttcagcgctgctgagctttttccagggggaacgccatggatgataaacagcgctatcaggacgggatggcggtacggcgcaaagtattgggcgacgcccacgtcgaccgtacgctgcagcatctgacgccgttgaatgatgagtttcaggactttattacccgctatgcctggggcgagacctggacgcgtccggggctcgatcaccatacccgcagcatgatcactattgccatgctgatcgctctcaatcgcgaggcggagctgaagatgcatctgcgcgcgtcgtttaacaacggggtgacccgcgatgagctgaaagagctgatcatgcactctgcgctgtactgcgggctgccggcggccaatgccacgatgcatctggcgcagcaggtgtttgacgacatcgacgccgcgcagggttgagtcgtcgtccgggtcggattgcccggcagtcgttgtaggccgggtaaggcgcagtcgccacccggcgaaataacgtcacaactgaatatttccctgttcgcgctgcgtctggcagggctacaacttctatgttaattccgggcagattgcgctcccggttgatcttctgcgttatgtctcgtatggcgcagggagcgcacagggggcggccagtcgccgccgccccctgtacccccgggctccggccagcaaaatcgccactgcgtggtaccttcgacttatccctgcaggctgcgggtcgggccgaggcagcgtccctgcaaaacacggccctcagcccgcatccatgcgggctgccccggccttccgggaacgtctcagcgattttgaggccgccagcaccggcagtttcagtcgcgcaagtgggtaaatgagtgacaggccgcacgaacccctaggccgggtaaggcgcagccgccacccggcgaaatggcgggtacggcgccgatagattgcccggcggcgcagcgcttgccgggcctgggaagcgaagatcgcctgtataccccgtaggccgggtaaggcgcagccgccacccggcgaaatggcgggtatggcgccgatagattgcccggcggcgcagcgcttgccgggcctgggaagcaaagatcgcctgtagaccccgtaggccgggtaaggcgcagccgccacccggcgaaatgacggcacaaccggaaatgtccctgttcgcactatgtttggcaggaccacaacgtttggcagggctacaacttctatgttaattccgggcagattgcgctcccggttgatcttctgcgttatgtctcgtatggcgcagggagcgcacagggggcggccagtcgccgccgccccctgtacccgagaaagatgaccagcacagcatagagtcgaacttcaatattgccgagatagcgccgccagtgctgcggtatggcgctacgtttttcgaggatccgcagcaggaaaaaacgtcgcacccgccgccaggcgcggaaggcgccgtagtaaaacagcgccagcagcagcgccccggccagggctttaccggcggagatgaacagatagcggttgttgaactgctcctggaggctggtgcgctgggcttccatacgcgccagcacccgctgggctgcctggtcgagggttaaatcatcgccctcgtcgagatccgcctggctcagcagcagcaccggtttgccgttcatcagaaacagtctgcctggctgaccatagcggataaccggcacgacccgcagcggctggcgaatatcatcttcggtgaaggcgcgcagggcgctacgggtgcgcaaaacgcgctcttcgggcgtggtctggccaaaggtggcctgcaacatgacgacaggttggtggaaaatcgtgaccgtgcgtgcctgctcgcgcgcggttggctgctgtcgcggttcggcggccagcgccggctggagcaccagcagcgccagcgcccagaggataacgatgcttatcctgttcattgaggcacctgagataagaattattgttatttttcagcaaaaaacggagggcttgtagttgagcatagcctggtgcgaagtgaattcaagctggggaaacgcggacataaaaaagccgtcgcccaaacggcgacggcctgatatcagcgtcagaggatagcgttagccgtgctgtttacagcccgcgcactgcttattctggatctgctggaagaagtcgttgcctttatcatcgacgaggataaacgccggaaaatcttccacttcgattttccagatagcttccatccccagttccggataggccacgcactcgaggctcttgatactctgctgggcgagcactgccgccgggccgccgatgcttccaaggtagaagccgccgtgtttatggcaggcatcggtcacctgctggctgcggttgcctttcgccagcatcaccatgctcgcgccgtgcgactgcagcagatcaacgtaagagtccatgcggccggcagtggttgggccgagggagccggaagcgtaaccggctggcgtttttgccgggcccgcgtagtagatcgggtgatctttgacgtactgcggcagcgcctcgccgttgtcgataagctccttcagcttggcgtgggcgatgtcgcgggccacgataatggtgccgttaaggctcaggcgggtggagaccggatgtgccgacagctgcgccaggatctcgctcatcggctgattcaggttgatgcttaccacctcgccttcgccggcctgacgcagatgctcaggaatatattttcccggattgctctccagcttctcgatccagataccgtcgcggttaattttggctttgatattgcggtcggcggagcaggagacgcccatgccgatcgggcaggaggcgccgtggcgcggcagtcggatcacccggatatcgtgggcgaagtatttcccgccgaactgcgcgccgaggccgaggttctgcgcttcctgcagcaattcctgctccagctgcacgtcgcggaacgcctgaccgtgttcgttaccttcggtcggcagaccgtcgtaatagcgggtcgaggccagtttcacggtcttcagcgtcgcttccgccgaggtgccgccgattacaaacgcgatgtggtacggcgggcaggcggcggtgccgagagtgcgcatcttctcaacgaggtagtttttcagcttcgccggggtgatcagggccttggtctcctggtacagataggttttgttggcggaaccgccgcctttcgccatgcacaggaacttatattcttcaccgtcgacgctgtagagatcgatctgcgccggcaggttggtgccggtgttaacctctttatacatatccagcggcgcgttctgtgagtagcgcaggttatcttcggtataggtgttgtaaacgccctgcgccagggcggcttcatcgccgccgccggtccagacgcgctggccttttttccccatgataatcgcggtgccggtatcctggcaggtcggcagcacgcccttggcggcaatttccgagttgcgcaggaactgcagggcgacatatttatcgttatcgctggcttccgggtcgagcaaaatcgaggcgacctgttgctgatgggagacgcgcagcataaaggcggcgtcgtggaaggcctgctgagcgagcagggtcagcgcctgcggctctactttcaggacctgctggccgtcaaattcggcgacggagacgtgctctttgctgagcagatagtattccgtatcgtcgtgcgccagcggaaacggatcctgataaacaaacggtttagtcgacatagtcacttactccataaagataaaaaccgccggggtagtcccggcggttatgaatcagaacatcatggacatccacggatagccaatcagcagcagggcggccaggaagatggcgccaaagatggtgccgaggcgccagtaatctttggtcggcaggtagccgctgccgtagtagattgggcttgggccagtaccgtacggggtgatgatccccatcacgcccagcgaggtgaccatcagcaggacaaacacttccatattcattcccgggatagtcgaggcaatggtcagcatggccggcagcagcgcggtggtgtgcgcggtggtgctggcaaacagatagtgcagcaggtagaacgccagcagcaggacgatggttgccatccccggggagatgccgctcatcagcgcgccgccctctttacccagccaggcgataaagccggtggaggagaggccgtcggccagtgccaccagggtggcgaaccagacaaaggtgttccatgccgctttgttgttggtgatatcgctccaggagagcacgccggtccacagcatcagcacgataaccagcagggcagccagcgccggttcgatccagtcggcggcgaagatccacatcatcagcgcgaagcagacgaagaccagcagcagaatttcattgcgcgacagtttgcccagtttttccagttcacgcgcggcccacagtggcacttcgttattgactttcacttccggcgggtagaaccagtaggccagcagcggcatggccagaatcagcaggatacccagcggcaggaaggcgatgaaccaggtgccccaggagatattgatgccaacaatgcttttgaccagcgccagggccagcaggttcggggccagagccgacaggaacatcgagctggtaatacaggcggcggtgatcgctacccacatcagataggaaccgattttacgtgcgctcggatcgtttggctttgaaccgtacagcggcggcaggttagcgataatcgggtagatagtccccccgctgcgtgcggtattagacggcgtaaacggcgccagcagcagatccgcgaaggtgatggcgtagccgagcgtcaggctgcgacggccaagatatttcaccagaatcagcgccaggcggcggccgaactgcgttttatcgtagccggcggcgaacatgaacgcgccgaagataagccacacggtggagttgccgaagccgctcaccgcccacttaaaggaggcgccagccattttgaagcctggcgcggccatctgatccgggctgaacagcagccactggctgcacagggcaataactaccacgccggtgataccgataacggcgccgggcagcggttcaaaaatcaacccgacgatcaccccgacaaagatagcgaagtagtgccaggcgtacggcggcaggccttcggggaccgggacgaacaataacagcacggcaacgataatcggcagcgccatcatcaggagaggttttttattcgcagtcgttggcttgactgcaccggcaggcggtatggttgtctttttctctttcataatgagtatctgcaagttgttgaaaataacgtttacgccagcgtcttgctcagtggtttctttaattacaaaagttactttagtttttattttgcgtttctgagtatcgacagggcgcttatttaacgcgttttatgaggcgttaaattaaatttgttggttatttatatattgcgctttcaatggccgttgcaattgatcaagatcaataaaagccggtgatttcactatttttttattatcagtataaccctatatgatgaggtgttattnnnnnnnnnnnnnnnnnnnnnnnnnnnnnnnnnnnnnnnnnnnnnnnnnnnnnnnnnnnnnnnnnnnnnnnnnnnnnnnnnnnnnnnnnnnnnnnnnnnnnnnnnnnnnnnnnnnnnnnnnnnnnnnnnnnnnnnnnnnnnnnnnnnnnnnnnnnnnnnnnnnnnnnnnnnnnnnnnnnnnnnnnnnnnnnnnagaggtagcgatgttattgctggggttaaatagttttataactaacgtaattggtttagtaattaaaaaacgcgctatattattggcatgacaacaggaattaaaaaaccaaaaccattaatgattccgtcacctcattctgagcttttaatattttaaaatctggagcgtaacttatgaccagtaacgaacgtattttgcagccatttactttaccaaatggtaccgagctgaaaaaccgtttgctcatggcgccaatgaccacctgcaccggttatttcgatggtactgtcaccagcgagctggtggagtactaccgcgcgcgcgccggaagcatcggtaccattattgtcgagtgctgctttattgatgactacggtctggccttcccgggcgcgatcggcattgataatgatgaaaaaattgccggcctggcgaaaatcgctgaggcgatcaaagccgagggttcaaaagcgattctgcagatctaccacggcggccgtatggtcgacccgcagctgatcggggggcgccagccggtggcgccgagcgctattgccgcgccgcgtgagggcgccgccatgccgcgggcgctgagcggagaagaagtggaagggatgatcgccaagtttggcgacggcgttcgtcgcgccattctcgccggtttcgacggggtcgaaattcacggcgccaacacctatctcattcagcagttctattcgccgaactccaaccagcgcgatgacgagtggggcggtagccgcgacaaccgcgcccgtttcccactggcggtgctggatattacccacaaaatggcccgccagtatgctgacgatgcctttatcatcggctatcgcttctcgccggaggagatggaggtcccggggatccgctttgacgacaccatgtatctgctggaaaagctggccgcccgcggtgtcgactatctgcacttctcggtgggtgccaccctgcgtccgtctatcgtcgataccagcgatgcgacgccgctgatcgagaaatactgcgcgatgcgctctgacaccctcgcccaggtgccggtgatgggcgtcggcggggtggtgaacgccgctgatgccgagcagggcctcgatcatggttatgacctgatcgccgtgggccgcgcctgcatcgcctatccggactgggcgtcacgtatcgccgccggcgaagagctggagctgtttatcgacagcacccagcgtgaagcgctgcacattccggaaccgctatggcgtttctcgctggtggaagcgatgatccgcgacatgagcatgggcgacgccaaatttaaaccggggatgtttgttgagaccgtccacgatgacgccaatgagctggtgatcaacgtcagcctcgaaaatgaccatattgccgatatcgaactggcggcgagcccggtccagactgtggaattcaccaccagcttcgaagagatccgcgaacgtattctcaccgccaataccccgcacgtcgatgccatttccggggccaccagccagagcgaggcggtgaaaaaagcggtcgccaaagcgatgctgaaatcgagtaaagcgctggcggcggaagagggcggcaatgacgccgcgccgaaaagctatgatgtggtggtagtcggcagcggcggcgccggtctggcggcagccattcaggcacacgacgaaggggccagcgtgctgatcgttgaaaaaatgccaaccatcggcgggaacaccatcaaggcttccgccgggatgaacgccgcggaaacccgcttccagcgcgtgaagggtatcgaagacagtaaagagctgttctatcaggaaaccctgaagggcggccacaacaaaaacaacccgcagctgctgcgccgtttcgttgaaaacgcgccgcaagccattgagtggctggcggaccggggcattatgctcaacgacattaccaccaccggtgggatgagcattgaccgtacccaccgcccgcgcgacgggtcagcggtcggcggctatctgattagcggcctggtgcgcaacatcaccaaacgcggtattgacgtcctgctggatacctcggtggaagagatcctgatgcgcggggatgaggttagcggtgtacgtctgatcaacgacgaaaaagaggtcattgaagtacagaccaaaagcatcgtagtggccaccggcggcttcagcgctaacagcgcgatggtcgtgaagtatcgtcctgaccttgaaggcttcgtcaccactaaccacaaaggggctaccgggagcggtatcgcgttgctggaacgcatcggcgccggcaccgtggacatgggcgaaattcagattcacccgaccgtcgagcagcagacctcgtatctgatttccgaatcgattcgcggcggcggcgctattctcgttaaccagcaggggaaccgcttcttcaacgagatggagacccgcgataaagtctcggcggcgattatcgctctgccggaacactatgcttacatcgtcttcgacgagcatgtgcgggcgaaaaacaaagctgccgacgagtacatcgccaaaggcttcgtcaccagcgccagctcaccgcgggaactggcggacaaactggggatggattaccataccttcctcgccaccctcgagtgctataacggggcggtggaaaaacagcatgatgaacagtttggccggaccaccgcgctgcgcgcgccgattaacgaaggcccgttccacgctattcgcatcgcccccggggtgcaccacaccatgggcggcgtgaccattaataccgatggcgaagtgctgaatgtggcgcagcagccgattcgcggcgcctacgccgccggtgaagtggtgggcgggatccacggcggcaaccgtatcggcggtaacgcggtggcggatatcattatcttcggtaccctcgcgggccatcaggcggcgaaacgtgccagaggataacctgtaaccttgctcctgccgggttggcgctttcaccgcccggcttgccccttctaaggagagcccgatgtccgataaccgcgtctatagctactccgccgtgttgatgggctcgcccatcctgctcaaactctgttcccacgatgaggcgatggcctcccgcgttttccagcttatcaagcgctacgaagacctgcttaccgttaaccgcgccgagtcgcaggtgatggatatcaaccatgccgccgggcgtcatccggtcaccgtcagccgaccggtctttcagctgatccagtgcgccaaagccgccagcatggtgcgcgacagcgcctttaacctcgccatcggcccgctggtgaagctgtggcgaattggttttcacgggcacagcgtgcctgacgcggctgatatcagagcccgactggcgctgacccgcccacaggaggtgatcctcgatgaggcaacctgcagcgtgtttctccaacagccggggatggagctggatctcggggcgatcgccaaaggttatatcgctgaccgcgtgcgcgattatctccgtcagcagcaggtggagaaggcgctgatcaacctcggcggcaatgtgcataccctcggcgaatgggccattggcctgaaaaaaccatttgccgacgcgcaggcgctgatcggttccctgacggtcaacgggcaatcggtagtcacctccgggacctacgagcgctatttcgaacaggatggcaaacgctggcaccatattctcgacccgcgcagcggttatccgctggacaacgaactcgatagcgtgacggtcatttccgcggattctttagacggcgacatctggaccacgctgctgttcggcctcggcgtggagaagggctgcgcagcgctgcgtcagcggcaggatatcgacgcgattttcgttaccaaaaatcgcgacattattctctcatcgccgcagcggctgcgttttgcgccgctggacagcggctatcgggttattgactgtactgcttaagcaaactgtactgttcggcgaccaggcggtagcgatagaccggccgcccggtagcgccgtagtggatagtggtatagagaatattgatctgcgccagccaaatcagatatttgcggcaggaaacgcgggagatattcaccgccgccgccagctcatcggtagagaattcgacatccggatgggcgtcaatccactggcagagtgtgcgcagcgtttgcgcggttaaccctttaggcagcttgcgcgcgtcgctggcctccggcgcgccgccgtgcagcaggcggtcgacatcggcctgttcgtaatagggctggccggttattagcttacgcttctcccgccaggtggtgagcgcctcttcaaagcgcggaaactggaagggtttgatcaggtaatcgaccaccccgtaatgcatcgcggtctgtaccgtggcggcatccgccgccgaggtaatcatgataacgtcgatggcgcgccccgactcgcggatggtcggcaggagatcgagcccgctgtcctgctgcatgtagacatccagcagcaccagatcgatctcctgctgcggatcgttaatcatctcctgggcctgactgagcgtcgaagcgctcccgctgcaacgaaagccgggaacccttgccacgtacaggcgattcagttcggccaccatggcatcatcgtcaacaattaaaacatttatcacgcaggtttccttttactatcccaggggagatgaacaaaaaattgggtaaatacgccgggttccgattcgacggcgagggtgccgccgagctcgcgcaactgctggttggcaagaaacagcccgacgccgcgattctcgcctttggtggagaagcctttgttaaagatagcgtcgatgttgttctccgggatccccggcccatcgtcgctcacttcaccgcttagccagccgtcctggtagtgcagcagcaggccgatctcaccctccgcctggccgctcatggcgtccagcgcgttctcaataaggttgcccagcaccgtcaccagcaccgtgacctgtttctcgttcggacaatccggcaccaggctctcctccgccagcgtcagggtaaagccgcactctgtggcgcgctgaattttacttatcaggaagccggccaccaccggggatttaatgcgatgttgaatgtcgccgatgtccgcctggtagcggtgggcggtctgcagcacgtattcctcgagtttgccgtagcttttcatattcagcagaccgaggatcacgtgcaatttattcataaactcatgggaggtggtgcgcagggcatccacatagctcatcatgccgtccagtcgctgcagcaattggctgacctcagttttatcgcggaaggtacagatggcgccgacaaccgcaccctggctgcgaatgggcactgtattgccgatcagcagcagaccattgcaccccagttcgcggtcgtacattggctcgccgctttgcagtacggtctgcagatcgtcgagcagggggctgtgaacgagagtcttatccgggccggaaaagaggatctcttccgccgcggggttgatgagatttacctcgccatgggcatcgaccgccaccaccccctccttgagggcgtgaagcatggcctgacgctgctgaaactgggtggatatttcgtgcggctccagccccagcagcacgcgcttcaggccgcgaaccaggctccaggtgcccagcgcgcagaccagcgcgctgaacaggatggtcagcagcacgtcccaacggctgttggcgatctgttcgtccactttactcagtgaaatgccgaccaccaccacgccgatttgctgatgccgttcgttgaacaccggcgtaaacacccgtagcgccggggccagcaccccgtggttgatggcgacattctcttttccctgcagcgtcggctgaatatcgtggccgatgaacggtttgccgatgattgagctgtccggatgcgaatagcgaataccctgcatatcggtaacgatagcgtacaacaggtcgttgcggcgggtaatggcctgcgccagcggctgaatgatctgctgctgcgggggcgcctccagtccgcgcttcacctgcggcatatcggccatggtgcgcgccaccgccagcgcggtctctttcagaccgtcgcgggtggcgttgctgatctgcatataccacaaggcatacaccagcagcagcacggcgccgatgacgctgccgatcatcaaggacacggcggtgctcagctttaacggtaaggcgcgttggcgaacgcgaggcgggtgctctgaagccttcatgacgaccccgggtagattcagtgaaagattattatcgccgatagcgcggcatacataaagccgtgtaatcaaagcaaaaggccgcttttgctacggcagactcctccagcgcgcggtacactgcggcttttcgccacaggcttaagggagacactatggaactggcttctctggtccgggatatcctccggcagcggcacgttgaacgactggcccagcatcgtgaacaggataatgaagcggaagcagagtgggagatcgcccgctggcggcatcgcagcggggtggtgatccagcgccgctatgagctcgagatcgcgcagcaggatagcgcatcctgcccggagtgctggattgactggcaggttatcgacgccgccggccaggaggtcaacccgatgcgcaaacagttttataacctttgccagcaatccttctggctggctatgcaggcgggtggtgaagatgagacctcagacagaattgctcagataaccgtcaatcacccgtaaacgcgcgttggggacggtaaactgtgaccccgacggcggtaaagcgcagaacattccacttatagtggcggcagaggttaaatagtcctgatgaatataaggatatgcatcaggccgctgattttgccgagatgcgctttttctgtcgtaaatggaggttgttatgagcagttcgctaaccgcgtcaatgcaggctcgtcgtcacccggagaccacccacatcgatcgcctcgccaccgccgatatgctggcgatgctgcatcaggatgataagcagatttcggaggcggtcggcgcctgtctgccggatatcgcccggctgattgatatcgccaccgcgacgataagccggggagggcgcctggtcattattggcgccggcgcttcgggccggacggccattgaggcggtcagcgactattcgccggaaggtaaacacgcgctggtggggctgattgccggtgggcagacgacggcgatggccgagcgggagactgcagcgaataattatgacctgggcgcctttgagctgcagtcgctggacttcagcaaccgcgatatgctgctggcgctgaccgtcagcggcaagacgccatgggtgtggggggcgatgcgccacgcctggtcgctgggcgccccgatagcggtcatcacccagcagccgaccagcgaggcggcgcagctggcggatatcattattgctccgcagaccgggccggaggcggtggcggggttagccaatccgaaggctcagttggcccagaggcagatcgtcaatatgctgacaaccggactcgccatccgtgacggtcgggtgtacagcaatttgcgggtggacgtgcaggctgacaattcgcactgggcggagcggcagatagcgattgtgatggcggccaccgattgcacgcgcagtgaagcaaaggccgccctggccagctgtcatcagcactgccgcaccgcgatcctgatgctgctcagcgggcttgacgcctggcacgcgcgggagctgctaaccaaacatcacgatcatctgcgtctcgccctgcgtgaagcccagcgtagcgctgtcactcccgcccagtaatcccttctctgccaggcgcgcgannnnnnnnnnnnnnnnnnnnnnnnnnnnnnnnnnnnnnnnnnnnnnnnnnnnnnnnnnnnnnnnnnnnnnnnnnnnnnnnccttattttttatccgtcttcgctctatttttaaaattgattttttaagttaaataactgtttggtttaaaatgcgagagtgtaaatgatattttaaaataaagtaaaagtgcgttaatatgctgcctcttatgaccgtgtgctacgtgataattctattatgcctgcaatgaaaaaaacgattatttccttaaccgcattagcgatgttcgtcagcgcggcgacgcatgctgaagcggatacctcgaaaaaaaccgacttcctgctgattggcggcgggatcatgagcgcctcgctcggcacctggctgcaggcgctgcagccggactgggatctgaccatggtggagaaactggacggcgtggcgctggagtcttccaacggctggaataatgccggtactggccactcggcgaatatggagctgaactatacgccggagcgggcggacgggtcgattgacgtcagcaaagcgctcgatattaacgagcagtttatgatttcccgtcagttctggtcggcacaggtgaaacgcggtattttgcacgatccgcactcgtttattaattccacgccgcatatgagcttcgtctggggtgataatgtggattatctgcagaagcgttataacgcgctgcagcagaccactttattccaggggatgaaattctccaccgatcacgcgcaaattaaacagtgggcgccgctggtgatggaaggccgcgatccgcagcagaaagtggcagccacctggacgccggtgggtaccgatgtcaactacggcgaaatcactcgccagctgatcggcagcctgaagaaaaataaccacttcaccctgcagacctcctctgaggtaacggatttcaaacgtaatgccgacaattcctggcacgtaacgattaagaatgtgcagagcggggaagcgcagactattgacgccaaatacgtctttatcggcgccggcggcggcgcgttgaagctgctgcaaaaaaccggtattccggaagcggacaactatgccggcttcccggtgggcggctcgttcctgatgaccgagaacccggcggtcactgcgcagcacctggagaaagtgtatggccaggcttcagtcggcgcgccgccgatgtcggtgccgcaccttgatgcacgttacctcgacggtaagcgcgtggtgctgttcgggccattcgccaccttctcgaccaagttcctgaaaaatggttcgttcttcgatctgctcagcactaccaccaccaataacgtgctgccgatgacccacgtcggtctcgacaacttcgatctggtgaaatacctggttagccaggtgatgctcagcgatgatgaccgtttcgctgcgctgaaagagtactacccggacgcgcgtaaagaagactggaaactgatccaggccggccagcgcgtacagatcatcaagaaagacgcagagaagggcggcgtgctgaagctcggtaccgaagtggtggtcgatcagcagaaaaccatttccgcgctgctcggcgcgtcgccgggggcttccaccgccgcgccgatcaccctgaacgtgctcaagcagatgttcccgcagcagtttaactcgccggagtggcagagccgcattcacgctattgtgccgagctacggccagaagctgaacggtaacgtggcgctgacccagcaggtttgggatgacaccgctgcgaccctgcagctgacgaaaccgccggtgatccagatgccagcggctgcgcctaccgcgaccgccaagccggcagagacgccgcgcgaggcctcgccgcagcacgatatggcgctgtaaaagcaaactcgacagtgaacaaaagggaagaccatggtcttcccttttttgcgttatttaccggctgaggccgcgcgctgcctgcaactttggcgtcataaaagatatactggtttgaattgaaataagaaaattaaaccaggagtgtggaagggccatgcaagaggatattaacaaggagatcaccttccgcaagctgtcggtctttatgatgtttatggcgaaaggtaatatcgccagaaccgccgaagcgatgaaactcagcagcgtcagcgttcaccgcgcgctgcataccctggaagagggggtgggctgcccgctgtttgtccataaagggcgcaacctgctgccgctgcaggcggcgtggacgctgcttgaatactgccaggatgtgataagtctgatgaaccgcgggctcgaggcgacgcgcaaggttgcaggcgtcggtcaggggcggttgcgcatcggtaccctctattctctgaccctggaaaccgttccgcgcatcattatggggatgaagctgcgtcgcccggagctggagctggacctgacgatgggttcaaatcagatgctgctggatatgctggaagacgatgccctcgatgccatcctgatcgccaccaacgaaggggagttcaataataccgctttcgacgtggtgccgctgtttgaggacgatatttttctcgccgccccggcgaccgaacggctggatgcctcacggctcgccgatctgcgcgattacgccgaccgcaagtttgtttcgctggcggaggggttcgccacctatgccggattccgggaagcattccacatcgccggcttcgagccggagatcgtcacccgggtgaatgatattttctcgatgattagcctggtgcaggctggcgtcggttttgccctgctgccggggcggatgaagaaagtgtatgagaaggatgtacagctgctaaagctggcggaaccctaccagatgcgccagctgatctctatcgtctattcgcaccatcgcgaacgcgatgccgacctgctggcgctggcagcggaaggacggatgtacgcccgcagtattaatcgctaagccgctgcgccagatggcgggcgacgtccaggccgctgcgctccagcgcaatggtctccccgcgccagcccgcctggcgggtcaggcaggtgagcaccccccggggggcatctcaatggctaagcgcgcatcgcgctcatcggcggcgaccatcgcctcctgccagtggaccgggcgcgccatgttcatcgccagatcgtcggcgatccgctgcggatcccacagcacgcgcgccgtcgagccgcttaaataggcgcaccgtgggcgccttaagctggcgccggcaaaagctttcgccagctcagcggcgggtttatccagcagcgcgcagtgcgacgggacgctgaccgccagccgctgggctttactggcgccagcccgcagcgccagctgcgccacctcggccattgcctcatcacggcccgcaatcacgaactgcgtttcggcgttcaggttggcgagataaacctcgtggccctgcatcagcgcctcaacccgcgggcgggtcaggcccataatcgccgtcagtccgtaaccttcaggatacgcctgttccattaagtccccgcgcagggccaccagccgcaacgcgctggcgaaatcgagcgcgccggcaatcaccgcggccggaaacgcgccgatagagaggccgctgaccatctgcggatccacggcctgacgctgtagctcgcgcgcccaggcgacaccggcgatcagcagacagagctggaccgcacgggtgtgttgtagcgcatcggcgctatcgagggtatcgacttcatcccccagcacggcgcgcgcctgggtgaggtttgcctcgcgatcggggatcatcgccagcatgccgggacgctggccgccctgaccgggaaaggtaaataaaatcttcattattcctccctgtgccacggcgtcgcggttaagcgcgcgccgcgggacgttttcagcagcgcgcgcccgtcgcgcagccattcattaagggcgaaggcgccgtacggcgtttcgacctgggtatcagcgcggcatgggagttgggccacccgggtctgccattccagcagcgcctcgcggtcaagcggctgtggcgcgcggatcagcagatccagatcgctggccgcatgcagcaccaggatctcggttgccagcgcgtagccggtactgccggtgacgccccagctccagggccagcggtgtaaggtgagggcgatagccccctggaccggcggctgagagacaaaaggcgaatggagtaagacctcacgatcaacaagcatctccggggtgacgctgcgcacgatattgcgcgcctgtacccagccggcggcgcgctgctcgcgcttcatgccccgcaccccaaccgggacgcgggcctggtcgtcaacgtcgcgcctcaccaccaccggcagcgcggctcgccactgctgagccacccacggctcggcaatgtcttccagggcgctggcgcggtttaaccaaactagatcatggggacgcggcgttgctgacatggtttacagtcctgaagtcaaagagataaacagcggtagcgacaggatacacagaaccgagctcaacagcagcacggcttcagcatccggagactggacgccgaagcggttgccgaagaccacgccaaagaagccggcggccagggcaatcatcaggatcgcggtaatggcaatggaaccgtgcagcccaagtaacatcaccagaccccaggcaataaacggctgcaccagcagtttcacgatggttgatgtagcgatcagcgcattgagctgcagtttacgcgccgacaggatcaccccggtgaggaacagcgcggcggcggtggcggccaggcccagcggtttgatcgacgccagcagcaggtccggcattttaatgccgatcgcggaaagcaccaccccaagcagcgggccccagacgatcggttttttcaccgaacgccacatcagcaccggcagcatcgccagcgtagaaccgctgttttctcccgcggcgcgggctttttcacgttccagaatcagcaggcagaacggggtcatcagcaccgagccgcaggcgatagagaccgctaccgacagtgaggttgacgcgccttcacccagcacgctgccgaggatcggcagacctaacgcggcatagtttggcagggcgacggtgagggtcagcaccgcggcatcctgcggcgtgcgtttgaacacgctggtggcgaggaagtagatcgcggcataggtgatccacatcgcgccggtcaacaccagcaccaacggcgactgggcgacgataccggcccacggcgtttgtaccgtcgcgctaaacagcgtggcgggtaaggcaaaatccattacaaaaatattaagcagcgagacgtttttgttatctaccatcccggccttaccggcccagaagcccagcagcataatgacgaaaatcggggcaagagcatgaataatcacataagtcataaatcacctgtaaataagatagagtactggcgcgattgttattttttctaaaagccgtcccttcccggcgcggttattacgcgctccgggggacggcttccggcaggttttcttctactacttacgtacgaacgtcttaccagctggcgcgcatgcgatcgcggaccagctgcgagctgcggcggttttccgcgcccagacggcacttcagtgaggtatcggtacgcgcgtcagcgatggcgtcgcgcagcgtgttgctgaccaacgacagatcgtggtcgtctggggcatccggattattaatatccagcagggcggagagcaggccgagcgtcgcatagttgctgacgtcgtaggccattggcggaatggtagccgccagtttctccagcgcctctacggtacgcagggtaatgcgcgccgccgacgctttacccatcgcgtggaccagcacgccgctatcgttaaaggcgatcaggcggttggcctggtagccgtgggccagaaacgccccggacatcgctttgccgacgatcaggccaattaccgggtggccggccaaacgggctttggcataagcgccagccgccccggccagcgcctggtgaatgccgaaagcttcttcgcggcggccataggcctggcttggcacatcgatcacggcgacgatcggccgtttgactggctggtcggcgtcggcggcaatggtttcattaaccactttcgccagcgtccagccttccagcaggccgacttcgccgccggcggcgcgcgggtagtggttgttagcatccgggaccacggcgataaaacgcacgttttcgccattaatctggccgtctgccacctggacggaagggcacaggccgctcatcagcggcgcgtcgggcgccagtttgttcagccacagcgcggcgcggtttgggaactgactcattatttatcctcccgggcaaaaagctgtttaatctgcgcggtatccgcctgctggcgggtgtcgaactggctcaagcgacgcagataatcgtcatagttgtcgctgcggtgctgtaccggtacgcctttggcgatcgcctcattcattgcggttttaacggcgttaacgccatcgttaaccagcgcgtcgaccagtccgctggcggcgcgaatttcgccgccggtcatgctccagataaacggccggttgcgggagtcgtactcttcaatgccggcttcctgctcgataacctgcgggccgttgagaccgagacgggcttcacgagtgacgataaggtaactgcacagcgcggcggcgatagacataccgccaaagcagccgacggtgccggcgatgatgccgaccactggggtgtagcggcgcaggtcgacaatcgcggcgtgaatatcggcgatggcggccagaccgaggttggcctcctgcagacgtacgccgccggtttcgaggcacagcaccgcctgcgtcgggataccgttgcggttatcttccgccgccagctccagcgcggcggccattttggcgccggacacttcgcccatactgccgccctggaaggtgccctcgatggcaatcaccaccgcaggctggccgttgatcgtgcctttggcgaccaccataccgtcatcggattgcgggacgatgccctgggcgccgagccacggcgacataataccgtcaaacggatccagcagttcgcggtagctgccgtcgtccagcagggcgtgggcgcgttcgcgagcgcgcagttcgataaagctgcgatcgttacgcatgagcggcctcctcaaaaacctgttcaatacgaatacgggcgacgcccggcgtggcgccgaagtcgtggataatcaactgcccggcgggcaggccgttgatcaggttcaacctgtcgaacagcgcctgccagcgcgcctggctgttatccactgaggtggtgatctgtacgttgagcgtggcgctctgtgcggcggtataaagtacttccatatcgcctgaacccacgactcctgccagcgctcggccgctcagggcgcggctggcaggaaatgacaatgtaatctgttccataacatcctctgaatgcgttagccggcaactctgtcgagaaacagggtggcggcaaggagatcggcggcgcctcccggcgaggcgtttagcgccagcatgattgcgtccaggcgggccagggcggcgcgcccggcgaaactggcgcaaccgccagccgccagcacctcacaagcgccttgctgcatggcctgcagcccggccataccggcgcgcgacagcacgcaggtatcgctcagcgaggtcatgatggccatcagcgcatcaagctgcgcctgcggctcactggcgcctcgcgcccggctgtgctgcagttgcggcagcgccaggcgggtgatatgcgggaaaccacactgcgcttcctcgcgggcgcctggcacctgccagcggcggctggcgcgaagccctttactaaagcttttcggcgcgaagccgtcgggcaggcgggcgagggcggcggcggcgtcggcgatcgcctgtgactgaccctctccacccaacatcgccaccgcgctgaccagcaggcctagcgcccagatagcgccgcggtgggtgttaaccccacccgtcgccagcatcatctgcgcttcgccttcgcggccaaggcggccgacggtttcgcgcagggcgatgtccgccgggcgacgccagctttgctcggccagcgcgtgaaaggtcggctgcaggctgcgggcggagcgctccatcagcgccagattcaggtcctgatgcgcgccgttgccgcggctatccaccagacccggtttcgggctcaggcgggcttcgtcaatcagacaggcgctggcggtatgcgccagccagctgacgcggctttctgcgtgcaggggggagagatttttcattaccagctccggaattttgccggtgggttgtacagtccgtcggaccactccaccaggtcggcgacgctgccggcggccagcagggagcgggtggcatcgctgcggcgaatcccgagatcttccgggtagaccactttgccgctctgacgcagcgcggcgacgcgtttggcgtccacaccaaggccgatatcggtgatcccggccaccgcggcgaccatcgcccggcgctcttcaaggctctccgcacggtacaggtaggcgataccctcttcggtcaggacgtgggtgacgtcatcaccataaatcattaccggcgccagcggcatgccggaggttttcgccacctcaactgcatccagcgtctcaacgaaggttggtttcacgccggcctggaaggtttcgaccatctgcaccaccagctttttcccgcgctgcatcgggtccggctcggtgatcatattgagccatgccggggtggcgtggcggcgaccgtgcgggtcgtggcccatgttcggcgcgccgccgaagccggaaagacggccgcgggtgacggtcgaggagttagccagaccatccacctgcagggttgaaccaatgaacatatctaccgcgtactggcccgccagctggcagaaggcgcggttagagcgcatcgagccatccgggccggtaaagaagatatccgggcgggcgcggatgtactcttccatccccagttcgccgccgaagcagtgcacgctctccacccagccgctctcgatggccgggattaaggttggatgcggattcagggtccagtgtttacagattttgcctttcaggccgagctgctcgccataggtcggcaacagcaactcgatggcggcggtattaaagccgataccgtggttaagcgactgcacctgatgttccgcatagatgcccttgatcgccatcatcgccatcagtatgtgttcttgcttaatcaggcgcggatcgcgggtgaagagcggttcgataaagaacggcttgtcggcaaccaccacgtaatcgatccacgagccgggaatatcgacgcgcggcagatcgcattcgtcgtccaccagttcgttgacctgggctatcacaatgccgtcgtggaaggcggcggcttccaccagcgccggggtatcttcggtactcggtccggtatacaggttgcctttgcggtcagctttatagccggcaatcagcgcgacgtttggcgacagatcgacgtacaggcgcgagtagagttcgatataggtgtggatggcgccgatttcgagcaggccatcttccagcagctgcgagatacgcaggctctgggtgccggagaaagagaaatccagcttgcgggcaatacctttttcaaacaggtccagatgctcgctgcgcccgacgctgggcataatcatatgcaggtcgtggattttttgcggattaacttccgccagcatgcgcgagaggaaatcggcctgtttctggttgttgccttccagcacaacccggtcgccgggggcgagcaggttttccagtacgctgaccaactggtcagtcgggatgaccttacctggcatgttcgcctcggccagccgccgctgtttttccgttcggcgacggttccagacccgccccgtcgtttgttcggcattcattaataacctcctgattcgacaaatcgttttgtttgtcctggtggagattagtgtgcgacgcgaggctatgagcatcaattaagcgcggtggccgatcgttagcatcagagtaacgattccgccgcaacgtttgtgatgcggatcaataatacataaggcgtagtggtctacggagagagtgtagggcagggagcaggccggcgaagcgccggcctgcggaaggactactgtttactgacatcgcttaataagaaagcgatactctgcccgccgctggtctgctcgagggcaattttgacgataatcgtcaacggcaccgagagcagcatgccaaccggacccagcaaccatccccagaagattaaggacaggaataccaccagcgtcgagaggcccagcccgcgccccatgatacgaggttcgagaatattgccgaataccaggttgacgatcaggtagccggccagcactaccagcgcctcgtacagaccaccgaacaccagcacctgcaggatcggcggaatggccgccagcacggaaccgatattgggaatatagttaagcgcgaaggccagtagcccccacataaaggcgaagcgcacatccagcagcaccagcatgccccagaccaccaggccggtgatcaggcttatcgcagttttcagcaccagataatgcgatacgctgtcgatggcccgctggatggcgcccatgccttctactggtctggacattaactgctgcagcttagcgggaagctgcggcacctccagcagcataaacaccaccgtcagcagcagcagaaaaatggaggacatggcgttcgacagctgagtgagcaggctggtgaccagggtcattacggcgttagggtcgatgtacttattgagctcgaccaccgaaacggtgaatcccatacgctgcagccagggcgcgatggtttgcatcggctcatagagatagttgcgatactgcggcagggtgcgtgccagctcgttgagcgaggtccccagcgaggccagcagcacaatggctaacataacaatcaggccaatcagtagcgagatcgccagcacgcgcggtacccggcagcggaccaggagctggaccagaggattgatgatcaccgccagaaaaagcgccaggataaacgggacgattatgtccgccgcaaagcgaatgccggtaaggatgatcaccagcatgcccaacatgatgaccatctttaatccgttaagtgtaataatgggtttagccataggatcccgacctcaaacttccttgcctattaacaggttgcgttacattagcataatgacgcttttttgcagaacaaacgcattgaagaaaaaccgcggcgtaaagaattgcaaagtctttgaattaaatgtagcactatgctacaaatctacctgtgtttaactactgaggacaattttcatccgcaccggacgagaagcaacaccgcggataattgtaattttatggacaatcagttcaggatgtatattttaaatcaccccgcagtatccctcactttttcccgttttgccggcgaacagcactggcattcggcgctatagtcaccttctttctgcctgagctggcgccaagcgcacagcgatatctacgtcagaaattttcctgtttacgtctcgcgtaaacggtaatggattatattctcaagcaggagaagggatcatgttttattggattttattagctttagcaattattgctgaaattaccggcaccttgtctatgaaatgggcaagcgtgagcggcgggcacaccggctttattttaatgctggccatgattgccctgtcatatatttttcttgcctttgcggttaaaaagattgccctcggtgtggcctatgcgttgtgggaagggatcggtattttactgattaccctgttcagcgtgctgctgtttgatgagagtctgtccctgctgaaaatggccggcttgaccaccctggtgatagggatcgtcttaattaagtccggcacccagagaaaagcgtcttcaaagcaggaggtggcccatgcagcagtttgagtggatccacgccgcctggctggcaatcgccattgtgctggaaattattgccaacgtctttttgaagttttccgacggtttccgccgcaagatctacggcatcctgtccctggcggcagtattgggcgcgttcagcgccctgtcgcaggcggttaaagggatcgatctctcggtcgcctatgcgctgtggggcggcttcggtatcgcggcgaccatcgccgccggctgggtgctgtttggtcagcgtctgaataacaaaggctgggcgggggttatcctgctggtagccggcatggtgttaattaaactcgcctgacgtctcgccgcctgcaaagccaggcggcaaacggaaacttccttcacgcctggccccgctgtaattgtgtcaggtgacgctgagggctgcgcaggttcactgctttcggctggcggaaaatcatttccgccaggacgatgtcaataatgatattcttcaccagcctcggtccattactcaccggcaagcgcctccagcttatcgcgaaagccagtcaccgcaatggcgcgattgtccgcccgccagcgatcctgcgggccgggggccgaactctgcacggcgatcacctgccagccgtcctccgttttcagcagcagcggcgagccgctgtcgccaggcagggtgtcgcactgatgcgacagtacgctggtttgcgcccaccctgtcacgatgcaatcctggtggctgtaaagattatcgagatgatcttcaggatagccagactgggtaactttacggtccgccgccttcagcgcggcggtgagatcggccttgctgcccggaaagagcgggatcggcgtaatgccagacggagcatagcgcagcacgatcagaccaaaatcggacggcgccgcagcggaagggacaatccagccgtcgccatcggctttcaggcgtctgcctaagctgggatcgactcgcccgtcaatgccgtggatctcatagacccagttgcccttgcgggaaataaagcgcagggcgaccgctttgtccggcttgccgcgcgggggcgttaacagacagtggcccgcggtcagcgccagatgcggagagatgagcgtcgccgtacacagattgccgctggcggtttccaactggccaatcgcgtcccacggactctcctcggggcggttcaccgctttgcggtcatcgtgaccgaaaaacaacgtcttaatatctttggcgctcagtccgctatcatcggcatgtgcgcccagaggtaacagataaaatgaacacagtaataacagaacgtctctacgcatatcactctctggggaggctatgatgtctattgacagtagcaggagatttaagtttttgaaagtaaacaataattctaaacaggccaaaccgtataccacatcagcgcgcggtggggtctggcgctggtaaaacctcctgatttcaagcggttaataccagtgttctgcttgtgctatttccgcagaaagtggcgtcttgcgcaacaaaattcatgtatcagaacgtactgaattcggttaataatgcagcaattcatccgtgggattattcctggtttgtcagcataatgcccaaaaataatacttttacccaccagatcttcaccggaattcgcacttctttacgcctctcgtaattattttcaatgcgaaacattttctcaccgaaaacgttgttaccgtcgccctgccgttgagtaaatagagaggtagtaccggcgatgatagcctgaactctatttcccctgcgttcggagggcttatgtctaaaaaaggtattcgcgcactggtttatgtttccctggtctcagtcgctatctggggcgcgaccggctatctggtgatggaagccgtgcgtgcattgtgatggacgcaccacccggcaagggccaggcgtgcgagatattacgactaacatgtctggcgtcttctggcgccggacatttttttgcgccgcagagagtcacaggataatgggaagcggggagcgggtcagcgatagccgcacggtattcattttaatgaaaagctggtagaagcagcaaaatgcaggcgcgggataaataattaagagaggaaaaaacgggttgcaaccactgcgcatataattagcaggatcaggatgagctcaaaacgatagcgccgcagcatagtgctctccagaaaaaacggcgctgaaacagcgccgattattaagaaggttggttcaccgggaggaattatgctgccggctgtgcagtcggtttagcggcctggtgtttagtggttttgtggtgttttttcgctgcctgcgctttctgggctgccggtttagccgcagctttgtgatgctttttcgccgcctgagctttctgcggagcagctggtttagctgctacttttttgtgttttttagcggcctgggctttctgagcagcggctggtttagcttctgcttttttgtgttttttggcagcctgagctttctgctctgcggccggttttgccgcggctttgtggtgttttttgtgatgggtggtcttggcagccgtgctgtgggtggcagccggtgcctgagtggtgcttactgcgtcagcagcgaaagcggcggaagagagacccatagcagcggcaacgaccagagctaatacttttttcattctgatatcctcgaaaagttttcttaatttcaaccccactgcggggccggtgaaatcactatatgcttgtcttttcgagctttccgtgagtgtttggtatcggcgtgtaaccgaatgtacaaggcaggaacgacaggacgcgccgggtagcccggcgcgtatgattacaggtagcgagtggtcaggtgctcgcggaagtagcggctattaagatcctcaccggtggcctgctgaatcaactgcgaggtggtgaagcggctgccatgctgccagatattctgccgcagccagtcgaacagggcgctgaaatcgccttcctcaatatcgcgatctaatgtcggcagcgcgcggcgggccgcggccatcagctgcgcggcatacatcgcgcccagggtataggaagggaaatagccgaatccgccgtcggtccagtgaatatcctgcatgcaaccatcccgatagttgccggtggtcgacagccccagccagtgctgcattttctcgtcccacagcgacgggatatcatctacctcaatctcgccgtcgatcagcgcacgttcaatttcataacgcaggatgacatgcgccgggtagctcacctcatcggcatcgacgcgaataaagccgggtttcacctgctgattccaggcgacaaaattatcctggctaaaggccggccgatcgccaaaccgctcgcgcaccgccggtaacaggcggttaagaaaccgctcgctgcgtcccagctgcatttcaaagaacaggctctgcgactcgtggatagcggtggagcgggcgagtcctacgggctggtcgacccacgggcgaggcagattctgctcgtagcgggcgtggccggtttcgtggatcacgccgaacagagcgctgagcaggtcgttttcgttgtagcgggtggtgatgcgcacatcctggggtacgccgccgcagaacgggtgggcgctgatgtcgaggcgcccgccgtcgaagtcaaagccaaggatacgcatcgcctgcaggcccagctcccgttgttcagcaatggggaaaggcccctgcggggcgattagcgcctgcttcgcctgcttctccaccgcctggctaagcagggaaggtagccacgatttgagatcggcgaacaggctgtccagccgcgcgctggtcatatccggttcgaaaatatccagcagcgcgtcgtagcgtgagccgcccctggcatcggcgcggatctgcgcttcctgacggctcagtctgaccacctcgcgtaggttgtcggcaaagcccgtccagtcattggcgggacgctggctgcgccaggcatgctcgcagcggctgccggccagcgattttgcttccaccaggctctccggcagcagcgccgcctgatcgtactgacgctgcatttcccgcaggttggcctgttcaacatcattaagatcctgctggcgggcctcctgtaaccattgtcccacttttttatcggtcaggatctgatgctgcagcacgccgagctcggccagcgcttcgccgcgggcgacgctcccgcccgggggcatcatcgcgaacatatcccagccggcgatggcggcgagatgcgaaaagcgcgacaggcgctgaaaggtacgggtaagctgctgataaggcgtattttcagtcatagtggcgttcggtccgtgacaggtgaataaagagattatcgctttgcctctacactatcctgatacgcccggcgggtcgagcgttgcgcacaggggaagggaaagacacatggcgggagaataagctcacctctgtgatcggtgtgacagaaaacggtaacatatcggtactaaactgtgatcgattacacaggtctggaggttcggggtggtttatgaatccgttcacctggctgtttattgcactactgtccgttgatgccgtcagagagctgatgggcttgtcttccataatgggcatgtggtgaaacgtggcccgcaggccacgtcacacgcgactatttcagtcgctgatgtaagcaggtgccggtcaacagcgcggcaaggagcagcagcgcgataaacccaccgacgccgttccagccgtagtgatgccagaataccccgcctaacgtcccggcaagacttgaacccaaataatagctgaacaaatacagcgatgacgcctgaccgcgggcgcggcgggcgcgtgggccaatccagctgctggcgacggaatgcgcggcgaagaagccagcggaaaacagcagcatgccgatgaaaataagccacagggaagaaaagagcgtcagcagcaggccgcagagcatcaccgctgtaaagccaagcatcaccggcccgcggccaaagcgtacggtcatggcccctgccttcggtgaactccaggtcccggtgagataagctaccgacagcaggcctaccaccgcctggcttaacgaccacggcgacatcatcagccggtagccaatatagttaaacagggtgacaaaagcgcccatcagcagaaaaccttcgacgaacagcagcggcaggccacggtcgcgccagtgcagacggaagttaatcagcagcgttttcggtcgcagcgaggtcgggcggaaatggcgcgactcgggcaggatacgccagaacataatcgccgcggccagcgcaaagccgctgatcgccgccagcgccacgcgccagccgaagaaatcggtaaagaccccggtcagcaagcggccgctcatgccgccgatggagttgccgctgatatataaccccatcgaaaaggcgacgaaactggggtggatctcctcgctcagataggtcatgccgaccgccgctacgccgctcagcgacaggccgatgagagcgcgcataatcaggatgccgtgccagctggtcatcatagtcgacaacagtgaacagcaggcggccagcagcagggcggtgaccatcaccggcttgcggcctatagcgtccgacagcgggccggtaaacagcaagcccaccgccaacatcgccgtggaaattgaaagcgaaatactgctgctggccggcgacacgccaaactcgttcgacagcaccggcaggatcggctgcacacagtagagcagggcaaaggtggccagaccggcggagaacagcgcgagagtgacgcgcataaactgcggggtgccacgtttaataaacggatccggacgggatgcaccagcgacgctgacctcgcccgccggcacggtgtcaacggttgtagtacgactcacagagaattccttgcgtagaagttgctgcttaccaacagagtgttgtgaccattcagctcacatttttagggtatgaaaatgtaaatattctgtctaatatattaataatctcaaataagacgttttaaatatgaatatcgagttgcgtcatttgcgctactttgtcgccgtcgccgaggagctacattttggccgcgccgcggcgcgactgaacatctctcaaccaccgctaagtcagcagattcagatccttgagcagcagaccggcgctcgcctgttttcccgtaccaaccgcagcgtcagcctgacggcggccggaaagcagtttctcgccgatagccgacaaatcctcgcccaggtggatgaggcggctgctcgcgccgcccgtctacaccatggcgaaacgggtgagctgcgcatcggctttacctcctcggccccttttattaaggccgtctccgatacgctatcgatgtttcgccaacgccttccggatgtgcatattctcacccgcgagactaacacccgcgaacagatagtgcccctgagcgagggggctctggatttggggctgctgcgcaatactcaattgccggacaccctggcgtgggagcgggttctgcgcgagccgctgttggcgatggtcccggcgaatcacccgctggcccgccagcactcggtcagcctggcggcgctggcgcgcgagcccttcgtctttttcgacccgcacgtcggcactggcctgtatgacgacatcctcggcttgctgcgccgctacggccacacgccgaagattgcccaggaggtgggggaggcaatgacgattattggtctggtggccgccggcctgggggtatcgatcctcccggcctcctttcagcgcgtccagctcagtgaaatgcgctggctgccgatcgacgaacaggatgcggtatcggagatgtggctggtgtggtctaaacaccatgagcaaggggcactggcaaaacgctttcgtgaggcgctgctctcctggaaaagcgagcataattgaggcgaaaaggggctggaaatgtgcggtaaatcacaaggctaagtaaaaatttgacgttcaccgtcgaagtgcttcaccatagccgaaagtttatttcgaagcgcgaaaataagggagtcaatggtggtagcggatagtcaaccaggccatatcgatcaaataaagcagaccaatgcgggcgccgtgtatcgcctgattgatcagctcggcccggtatcgcgtatcgacctttcccgatttgcgcaactggcgccggccagcatcaccaaaatcgtccgcgaaatgctggaagcgcatctggttcaggagaccgagatccaggagcccggcagccgcggccgcccggcggtggggctgatggtggagaccgaggcatggcactatctggcggtgcgcatcagccgcggtgagatccatctttcgctgcgtgatttaagcagtcagctggtggtggaggatcagctggagctggcgctcaccgacagcacgccgtttttgacgcgcgttatcgaccatattgatcgcttctttattcgccatcaaaagaagctggaacgccttacctccatcgccatgacgatgcccggtattatcgataccgaaaatggcattattcatcgcatgccgttttatgaggatgttaaagatgtcccgctcggcgaagcgctggccaatcataccggggtgccagtctatattcagcatgacatcagcgcctggaccatggcggaatctttgtttggcgcctcgcgcggcgcccgggacgtcattcaggtggtcatcgatcataacgtcggcgccggggtgatcaccgatgggcgcctgctgcacgccggcagcagcagcctggtggagattggccatacccaggtcgatccctacggcaaacgctgttactgcggcaaccatggttgcctggagacgattgccagcgtagaaagcgtgctggagctggcgcagatgcgcatggcgcagtcgatgagctcgctgctgcaccagcgtccgctgagcgtggagtggctttgtcaggcggcgctgcagggcgatttgttagcccgggacatcatcagcggcgtgggtaatcacgttgggcgaattctggcgatcatggtcaatctgtttaatccgcagaaaattctgattggatcgccgttcaatctggcggcagaaattctttttccggcaatttccagctgtattcggcaacaatctctcccagcctatagccggcatattaccgttgaaagtactcagttctccaaccgcggaacgatggctggcgctgcgctggtcaaagatgcgctctataacggatccttactcatacgactgttacagggttaacattttttcatagtcacaccaaaaattgcgctatctcaagctgacctcagacggcttcacgtagactttgcccaccgttgattatttctctcccgtatatttcatcgacaaaactgtggggttagtgatgtttaagcgtttctttattacaggtacagacacctctgtcgggaagacagtggtttcccgtgcgctgttgcaggcacttgctgccagaggcaaaagcgtggccgggtataagcctgtggcgaagggcagcaaagagacgccggacggtttacgtaacaaagatgcgctggtgttgcagagcgtctccacgctggcgttaccttatgaggctgtcaaccccatcgccttaagcgaagacgagagcagcgtggcgcatagctgcccgatcaactacggtctgctgtccgatggtttgcagcgtctggccgcgcaggtcgaacacgtggtggttgaaggcaccggcggctggcgcagcctgatgaacgacctgcggccgctctccgagtgggtggttcaggagcagctcccagtgctgatggtggtggggatccaggaggggtgcatcaaccatgcgctactgacagcccaggcgatcgccaatgacggtttaccgctgattggctgggtggccaatcggatcaaccccggtctggcgcactacgccgaaatcatcgatgtcctcagcaaaaagctgccggcgccgctgatcggcgagctgccttatctaccgcgcgccgaacagcgtgagctgagccgctacgtcgacttagacatgctcggcaacgtgatggcgatagatcgaatcccggcgtaacgtccgcgacagcacagacgacacgacgcaggttatcagtagaccgggcagcagcgtatactgcccggtcatctcgcaaatcatcagggttgacatgatcggcgcatgggtcgtggcggccagaaacgccgccatgccggtcagacccatcatgatggccatttcttcacttcccggtagccacagcctgctgaagcaggcaaacagcatgcccatcgccaggccgacaaacagcgtcggggtaaagaccccgccaggcgcgccggagccgctgctggccagcaccgccagcagtttgcagataaatacgcccaccagcagcgcaccggacggcggcagcagcaaatagctttgcactacgctgtagccgttgccccatactgccggggtgatgagcgataagccgccgacaattagcccgcccagcgccagctgccacggcggcgccagcttcagtttaacgaacccgcggtggctgtagtccatcagccagataaacagcggcccgcacagcccggccagcaggccagtcgccagcattaagccatagtgcagggcgctgaggttctgctgtaacacgacgtgatacagcggcgcggcgccgccattaagaaactgcgtcaacagcagggcgatcaccgccgagatcaccaccggcccaagcgaggccagcatcagcgtgccaaagagaatttcagcaataaacaggctgccggccagcggggcatgataggcgctggccatcccggcagccgcgccgcaggcgacccatagcttccattcactctgcggcgtgaagcgacgggcaaacagcgaggccgccagcgcggccagcaggatcatggcgccttcccggccaatcgcgctgccggtcaccacgaccagcaatgacgccagcgatttcaccaggcttgccggcgtatcgaaacagccgtcgccggtctccagggcttccatataatcggtggcggcatgcggacgcgcgacgctgcgtcgttgccagagccagagtaaggttcccgccgtcaggccgcccagcgcgggggtaaccagccgacgccacgccggcagcgactgtgcggcgttgaccaggctcccgctgtcattactgagcaacagcgtttccagcaccaccatagcgtggcgaaacagcgccaccgccagggcggcgagaaggccaatcagggtggcgatcagcaggcggcgaaacatcacctgcacatcaggatagggatgaagacgatgcattagtcacggcgaggttcggaaaacattggcttattgtgatagggaataaccttagatgcaaaagcgataagtgcgggtgaaaggctgggaagcggcaaaataaaaccgcgccggatatcggcgcggcgaagggttaacgatagagcggtttttgcgccacggcgatcggcagattctcctgccactgcgccagagtcgcctgcgccagctgacccagcgcctgatagaaggggtgggcggcatggtcgacaaagacgctcaggaaacgcccggaccacggcagcaggtgccaggccagcagctgagcgaacaacgcatcctgctccgtttcgcacaaccatgccgccaggagtagcacggtgccgaagtgatcttccggttcattgccatcggcctccagcgcgataccgttctcgcgcatccactggcgcagagccagcgtggaatcgccaaacagcacagactctttatccagccagacagagccccagggcggcgccggcagggcccatggcccgataaacaggcgctgccaggcttccggcaacgtttcttcagccgatgcggcaaaccctgacgccagcggggctgcgaccgggaagggccactgctgctgccagctcccgtcctggaaggcggcgaccagcggcgcaatttccgcgctattcggcgcataagagaacagcgcgcccagggtgcgggcgcttaacgcgacggcgtcgcgatttgggatcggcatcatcacttattcctttctgcggcgcgcgcctgcgcgccgtctcattaaccggcaaccgccataccgacggtcatatgcagaccataaaacaggccgcggccaatacattcggcgatcaagaccagcagcaggccgatcagcagccccgtagcgcgcggcggctggcggcggatcagcggacatagccagcagccgaggcccagcgccagcagtaccaggcgtagcgcctggagtttgccgtattctggcagcagggtggccgcctgctgaaccgagctgtgaagggtactgagcccggcgctttgcataatgataactgcggcgctgatgaccagcgcggccacgctcagtccggcaaaaaaccagccgttaaagtcgactttcgccagccgcagcagcagggcggcaaacagcggcccgctgaggagcaccgtcagaaagaacgcgctggtggtgtagccattgtaccatgttggcacggtattgatttggtaaacccgggtcattgcgaggacaaacagcagccctaacagcatggcgatcgccagccagactttacccagcgtcgccggcattttttccagcaccgccagcagccaccagaatccgcccacggcgaagaacagagcgccgctggcgatttcgttgctcagcgccgaggcgccgatgcggttcagcgagttaaacgcgcgcagcggtgaaccgagatgcatcaccgaagcaagaaaaccaatgcccatcagcagccagataaaaaacatattgcgcaccagccgccgcgcttcccgttggtcccccagcgccagccagccaagaccgctgacgatggtcgcgccgaccacgcactgacccagcaccgtaaaaagcaccagcggccattcatgccatccgtttcccatctcacacctccttcgggttcgccaggtaaccggtggtatcgccacacggccgggcattggcgttaggtttgataacgatactcggccgggtaaagtgcgccgacggcagcggcgctaccgcggccagctggctatgcttagcgcgcagttcggcaattggcccgaaatccaacgcccgcagcgggcaggactcgacgcagatcggctttttcccctcggcgacgcgctcgtgacagccatcgcatttggtcatatggcctttgtcggcgttgtactgcggggcgccgtacgggcaggccatatggcagtagcggcagccaatgcatacctcttcgttgaccaccacaaaaccgtcttcgcgcttatgcatcgcgccgctcggacagaccttggtgcaggccggatcttcacagtggttacaggcgatggagaggtaataggcaaacacgttctgctgccagacgccgttgtcctcctgccagtcgccgccggcatactcatagatccggcggaagctgacctccggagtcaggttcttgtagtccttacaggccagctcgcaggttttgcatccggtacagcgagcggagtcgataaagaatccatattgcgtgctcatggtttactccttaaaccttctcgatatcgaccaggttggtatgctgtggattccccttcgccagcggcgacgggcggtgggtggtcagggtattcatgcaggcgccatggtcgatccgatctccggtcatattggcgtcgtgccaggcgccctggcccatcgccgagacccccggcatgatgcgtggcgtcactttcgccggaagacggacttcgccgcgctgattaaaaacgcgcaccatatcgccgtttttaatcccgcgtttttccgcgtcaagcggattgatccatacttcctggcgacaggccgcttgtaatacatcaacgttgccgtagctggaatgggtgcgcgctttatagtggaaaccaaacagctgcagcggatactggctgcgcagcggatcgtcccagccttcaaatgtggaggcgtagaccggcagcgggctgataacttcgtctttctccagctgccagcgggcggcaatctctgcgagtcggctggagtagatttcaattttgccggacggggttttgagcggatgcgcttcagatcctcgtaggccggcagcgccggatctttcgccaccattttggcgtacagatactgcagccactgttcctgggtacgtccctcggtaaaacgttgatgcacgtcgtcgccgagtcgtttcgccacttcgcttaggatccagtaaatcggtttgcgttcgaacttcgctgaggtggcgggctgaataaaaatcagatagcccatattgccggcgtaatcgttaggaatgatatcctcctgctcaacggtcatcaggtcgggcagcagcaggtcggcgtatttcgccgacgaggtcataaagttgtcgataaccacaatggtttcgcacttgctttcatcctgcagaatttcgtgggtcttattgatgtcggagtgctggttgatgatggtgttgcccgcgtagttccacaggaacttgatcggcacatccagcttctcttttccgcgtacgccatcgcggctggcggtcatctctggaccgcgggcgatggcgtcggtccaggtaaagcaggagatggcggtcttcaccgggttttccagcaccggcaggcgctcaatggtgatggtgtaggttgattcgcgggcgccgctattgccgccgttgatgccgacgttgccggttaagatcggcagcatggcgatcgcccgggcggtgagttcgccgttggcctggcgctggggcccccagccctggcaaatgtaggccggcttgctcatgccgatttcgcgcgccagcttaatgatgcgatcggtggggataccggttatacgcgaggcccactgcggcgttttagcgatcccgtcgtcgccctcgccgaggatataggctttgtagtgaccattcgccggcgccccggccgggagcgttttctcgtcgtagccaacgcagtatttatcaaggaaaggctggtccaccagatcttcgttaatcaacacccaggcgataccggccaccagcgcggcgtcggtgccggggcgaatggggatccactcatcttcccgaccggcggcggtatcggtgtagcgcggatcgatgacgatcattcgcgcgttagagcgctcgcgggcctgctccagataccaggtaatgccgccgccgctcatccgggtctccgccggattgttgccgaacatcactaccagcttgctgttttcaatatccgaggtgctgttgccgtcgttactgccgtaggtgtagggcatggcgcaggcaatctgcgcagtactgtaggtaccgtactggttaagcgagccgccgtagcagttcattaaacgcgccaccggcgacgcggaaggcgacgaacgggtgatgttgccgccgacgatccctgaagagtagttaatgtatacggcttcgttgccatactgcgctaccacgctcttcaggcggtcggcgagggtatccagcgcctcctgccagctgatgcggacaaatttgccttctccgcgcttgccgacgcgcttcatgggatagttaaggcgatccggatgattgatgcgccggcgaatcgaacgcccgcgcaggcaggcgcggacctgatggtcgccgtagcggtcgtcgccggtgttatccgtttcgacgtaaaccacttcatcatcacgcacgtgcagccgcagggcgcagcggctgccgcagttaaccgagcaggcgccccagacaatgcgggttgtgtcgcctgtagcctgttgtaccgccgccgcggcgcggcgcagcgtaaagggcagggtcagcccgccggcggccagcgccagggagccgagggctgtagattttagtagcgcgcgtcggctgacgccgccgggagattcctgattcgacattgctcactccatgatcgttatgttgtacggagaagggccgctgtgccattaacagacgcaggggtgagcgataatacgttatgggtagccagtagaccttatccctggtcaatgcagggataagatctttcatttgaaaccgaagagggcttactgagcgtcgttttcggcgggactgtcgctgttacgcgtataggtgattttgaaggtgtcgttggcgcaatgaccgaccacctgaaccccgggctggtctgcctgatcgtttggcacaatggccaggctgaaggcggtttccggtacgccattgttgatgatcttctgctggatgtcgcttttgacccgttcacaggagtcgggagccgccagtacggccgtggagcacagcagtagcgcagcgccggtgcagagggatagtttcatcttacgctccttatcgatgttatccagatttaagcatagcagaactggtgtaaacaattgtatttgctaatatgatcggatgtacacaaaaggaatcgtctgtgaaaagattgtattggctgatcccggcagcgctgctgctgacggcatgcgaccgtaaaagcgccccggacgccttcaccccggagatggcgagtttttccaatgagtttgagtttgatcccctgcgcgggccggtgaaagattttagccagacgctgctggatgaacacgatgtggtggtcaagaaggtgagcgctcagctctccagggaagggtgtttcgatctgctgaccctggaagatgtggagaacaaaaccggcgccacgctgctgctggacgccaactattacgtcgacgggcgcacccacgagaagcggctgcgcctgcagggcaagtgtcagctggcggagatacctgccgccggggtgagttgggagacggatgataacggttttattatcagcgcacgcggcaaagagaccaccgccacctaccgctatgacagcgatggctatccgctgggaaaaaccaccaccgccaaagaggagcgatttaccgtcgcctcaacgccgtcaaaggatccgcgtaagaaattggactataccgccatcagcaccttcaacgatcgcacgctgggcacggtgcgtcagacctgcgactacgacgatcacgacaatccgctgagctgtgagctgcaggtgatcgatgaaagcgtccagccgccgctgacccgccactacaccattaaaaaccgtatcgattattactgagccgtcggcttcagcagggacggcccggacgttttgtgctcggccagatactggtgctggaacaggcacatgcggatggtgttgcggtactcgccgttaatgaaaaactcatggatcagttcaccctcgaccataaagccgagcttacggtaaatatggatcgctttttcattctctttatcaacgattaaatacagcttatacagattgagcacggtaaagccatagtccatcgccagacgtgcggcgcgggtggcgagaccttttccctggaagtcgggggagatgatgatctggaactcggcccggcggtgcacatggttgatttcaaccagctccaccagtccggctttatcgccattgcattcgatgacaaagcggcgctcgctttgatcgtgaatatgtttgtcgtacagatcggagagctcaacgaaggcctcgtacggctcttcaaaccagtagcgcatgacgctggcgttgttatcgagctggtggacaaagcgcaaatcttcgcgctcaagcgggcggagtttgacgtgtagcgcgtcggtcatggagattcctgtggtcaaaacggaaaagggattacagaaaggcggcgcccgcaggcgccagcgtggtcagggagcggctcagggattgatcgcgcggccggtgcgacggtcaagacagcgcagggtgtttggctcccaataggcattgacgttggcgctcttctggcagttatcctgcgcgtcgaaagcgacatcggctttatcccactctttttctgcccgtttgttcaccttctggcgcaggctgcgggtgtcgttccattgctctttttccatcgacgcctgctgacggctctgcgcgctgtcgccagattcaatcaccagccggtcggtggcggcataggagctggaggtgtagaccacagcgcttaacgccagaatggcggtcaggcaccagcgtttattcagtgtcatgttcatcacgatttcctttaagtgatgggttaaccctcaggttcagtttactacagctcttttgtcgggcatagccggcaaaacagcgtggggcagaggccattatcgcgtagaatggttcaacgctttgtctcttttacgaatcttttaatgctcaaaacaacgctgctgttctttgctaccgctctgtgtgaaatcgtcggctgttatctaccgtggctatggctcaagcgcggggcaacgccgctgctgctgatccccaccgccctggcgctggcgctattcgtctggctcctgacgctccatccggccgccagcgggcgggtatatgccgcctacggtggggtgtacgtttgtaccgcattgctctggctgcgggtcgttgatggggtcaaattaacccattatgactgggcgggcgcggccatcgccctgtgcggcatgctaatcatcgtggcggggtggggacgggcctaagcccgtcatgtgtgatccctgccgcttttttcaaccctaattcttgtatggtagtcgacctgttgccttacttatcagacatcctatttcatatgactctgtaaggaacaacgatggctatcgagactcttgccgcccggaccggggcgacgccgttacgcatccgtcgggtgcagaagatcaccctgacgctgctgtttatcgccggtatcgtcaactttcttgaccgctcttcgctgagcgtcgccggggaggcgatacgcgccgacctgggccttagcgccaccgagtttggggtgctgctctccgccttttcgctctcctacggcttcgcgcaactgccctccggtattttgttggatcgcctgggaccacggattgtgctgggcgccgggctgattttctggtccgcgatgcaggccctgaccgggatggtcaattcgttctcgcattttattctgctgcgcattggcctcgggatcggcgaagcgccgtttatgccagccggcgtgaaatcgatcaacgactggtatgcgcaaagagagcgcggcacggcggtgggaatattcaactcctcgacggtgctgggccaggctatcgccccgccggccctggtcatcatgcagttggcctggggttggcgaacgatgtttgtggtgattggtttagccgggatcgtggtcggcctgtgctggtatgtgggctaccgtaaccgtcggcagtttaccctgcaggaggaggagcagcagtatctggccagtgaggaggcggcccgcccggcgctgaagtttagcgaatggctggctctgtttaaacggcggactacctgggggatgatcctcggcttttccggtgtgaactacaccggctggctgtatatcgcctggttacccggctatttgcaggcgcagcaggggttaagcctggcccgtaccggctgggtggcggcgatcccgtttcttgccgcggcggtggggatgtgggtcaacggcctggtggtcgatgccctggcgcgcagaggctacgatcaggcgaaaacccgcaaaacggcgattgttatcggtctggtgctgtcggcgctgggcaccttgctggtggtgcaatcgtccacgccagcccaggcggtggcttttatctccatggcgctgttttgcgttcattttgccgggacgtccgcctgggggctggtgcaggtaatggtggcggagcataaagtggcttcggtggcggcgatccagaacttcggcagctttgtgtttgcctccttcgcgccgatcgtgaccggctgggtagtggatacgactcactctttcaatctggcgctggtgatcgccgccggggtgacctttgccggggcgctgtgctacttctttatcgtcaaaactcgcatcgattaacaacgctcggcgattcgtcaacagcaggcccgcagggacgcgcggccgccatgttcttctcctgcgctatcctgtcactgcggcgattgcagccacgtgccccgtgctttatcaggcgagatcttcttgtatggtagttgacagaaatcaaagatgttataccaattgcgtgagatggttgaggcacaaaggcattctcctcgagagttctccccgagaatggttgatgggctacataacaacgagagtcatcatggaaaacaccctcttaaccgctaacgccacgctgccgacctacgatcgcagcgcactgatcccccgtatcgttcatcttggttttggcgcgtttcatcgcgctcatcaggctgtgtatgccgatatactggccagcgagcacggcagcgactggggctacaccgaagttaatctgattggcggcgagcagcagatcgccgatctccagcagcaggatctgctgtataccgtcgccgaaatgtccgccgacgcctggaccgcgcgcgtggttggtgtggtgaagcaggcgctgcacgccggggttgatggtctcgaagcggtgctggcggcgatgtgtcagccacaggtggccattgtctccctgacgattactgagaaaggctattgccattcgccagccagcggcgaactgcagctcgatcacccgctgatcgccgccgatctgcataacccgcaccagccaaaatcggcggcgggggtagtggtggaggccttatctcgccgccgggcggccggcctgcctgcttttaccgtgatgtcctgcgataacatgccggaaaatggtcacgtgatgcgcaacgtcgtctgcgcctacgcccgggctttagacgaggatcttgccgcatggatagagcagaatgtcacctttccgtcgacgatggtggaccggattgtcccggcggtgactgccgaaaccctcgataaaattacccagctgaccggggtgcgcgacccggccggggtggcctgcgaacctttccgtcagtgggtgattgaggataactttgttgccggacgtccgcagtgggagaaagcgggagcggaactggtcgccgacgtggtgcctttcgaagagatgaagctgagaatgctcaatggtagccattcgttcctcgcttatctcggctatctggccggttatcagcatatcaacgactgtatgcaggacgataactaccgtcgcgcggcgctgtcgttgatgctggacgaacaggcaccaacgctgaaggtgcagggggtggatctgtcacgctatgccagtttgctgattgaccgttactgcaatccggcgctgaagcaccgcacctggcagatagccatggacggcagccagaagttgccccagcgcatgctggactccatacgctggcatctggtgcatcagcgtgattttacactgctggcgctgggcgtggcagggtggatgcgttacgttggcggcgttgacgatgcgggccagtcaatcgagatatgcgacccgttgttgccggttatccagcaagcggtggctgccagcgccgatggcgaagcgcgagtcaaagcgctgctgggtattgaggctattttcggcgtcgaactgccgcaggagtcacgctttgtcacggcggtgacccgcgcctacttagcgctgcagcggcagggggctaaagctaccgtcgccgcgtgggccgccgcgcaataatctttttccggtgtcggtcccggggtcgacaccggctcttcagttatttctacgatactccgctgatgtctattttttgctagcgatcggttttagcagacgcagaatatgatcgaacgcaatgtctatacataactctatatttccctgatttactaaagataattagctgttatttttccgaacaatgactggtatttcaccgcaataatggcatagttaagttattgaaaaagaactttctctgcaaaaggagtacgggccatgtataaaaaaattttattgcctgttgatgtctttgaaatggatttaagcgataaagcggtgcgtcacgcggaatttctcgcttcggccgaaaatggcgagatcaccttgctcaacgttctgccgaacagcagccgttcgctattgcgcggttttacggcggatattcgtaagtttgaagcctatatggaagaagagtcggagaaaaaaatgcgcgaggtggcgcgactgttcgccatccccatgacgcggatccatacccgcgtagtctttggcaacgtgcgtgacgaaattctggctatcagtaacaacgaagagttcgatgtcattgtgattggttcccgcaaaccagggatctccacccatctgctgggctccaacgccgagtcaattctgcgctacgccaaaacgccggtattggtcgttagataatcccttcaatgacaacggctgcgtcggccatgccggcagccgtctgactcttattcttcactaaaccagtcgcggttctcctggcgaatcagcagtacggattcgctgatttcatgcaaatggatactcatggctttttctaccgcctcggcatcgcgtttttccagcgcggtgaaaatctcatgatgctggcgcagaagcatctccggagaggtgacatggtccagactcatatagcggacgcgatcgatggcggctttaatattttccaccgtctcccaggccagctgacagtcggcaataatcgacagcttctggtgaaattcatcatcgagcaggaaaaagtcgtttaactgctgccgatcaacggcaatacgctgctggtgaagattctgttccagctgataaagttgctcttcgttaatcatgccggcggcacggcgaaccaccgcgcactcaatcgcctggcggacgaagcaaccattacgcacctgcgacaatgagattttattgacgtagctaccgcgctggggacgaatctggataagtccgttttccgccagcttaatgaaggcttcgcgcaccggctgacgagacaccgcaaaacgcacggagacttctttctccgacagcggtgtaccaggcgggatcaggcagtgaacgatatcccggcggaggatgcgataaatttgctgattgacgggttgcgtcggattcagttgcgattctgcggccattgatggttactttttagggggttatgcgcactattttacgcgttttttgcgtttccgcccatacccggcccgcaggccgggtggctgacggttagccctgacggtgaacgctgagtccggcaaagctctgactcaccggcatcatctccagggtgttgatgttgacatgtttcggcagggtggcgacccaccagaccgcctcggtcacatcttccggcgttagcgcttgggtattttcgtaagctttttcggctttagcgtcatcgcccttaaagcggacgttagaaaactcggtgccgcccaccagacccggctcgatgtcggtcacgcgcaccgcggtgccgtgcaggtcggtacgaagattgaggctaaactgacggacaaaggctttggtcgccccatagacgtttccgccggcgtaaggccagctgcctgccgtagagccgatattgatgatatggccgcgattgcgctccaccatccccggcagcacggcgcgggtcatgtacaccagccctttattattggtgtcgatcatatcttcccagtcttccacactggcgcggtgcgccggctccagaccaagcgccaggccggcgttgttcaccagcacatcgatagcctgccactcggcgggtaggtcagcaatcagcgtctcaatggcggcgcggttgcggacgtcaagttgcgcgatataaaggttatcgcccagctcgtctttcagcgtcttcaggcgctcttcacgacgaccggtggcaatcactttatgaccgttagcgataaaacggcgagtaatactttcaccaaaaccggcggtggcgccggtgaccatgataatcatcttactgttcctcaacgctttttgtgttttcataccatagcacgcacaggcggcgaccggtaacggaaatcattgcgaccccttaaggagaggcctaatcttacagcattagcctgtacaggagagaaagatgtccgaacgaaaccccttttttagcgtcagtacgttgccttaccaggcgccgccgttcgatgtgattgacgacagccactatcgcccggcgtttgatgagggcgtccggcagcagcgggccgaaattcgcgctattatcgacaatccgcagccggccagtttcgccaacacgctcgaggcgctggagcagagtggtcagctgctggcgcgggtgacgcgggtctttttcgccatggctggcgcccataccaatccttatattcaatcactggatgaacaattttccgccgaactcgccgagctggggaatgacatctggcttaatgcggccttgtttcagcgcgtgaacagcgtctacgagcagcgcgacgcgctggcgctggacagcgagtcctatcgtctcctgaccctgacgtggcaacgttttgtacatgccggggcgacgctggctcccgagcagcaggcggcgctgcgcgcactgaacaccgaagcggctacgctgcaaagtcagttccagcagcgactgctgggagcggcaaaaagcggcggcctggtggttgattaccggcatcagctggctggcctgagcgatgaggagatagcggcggcggctgacgcagcgcgtgaaagagggcttagcgaccgctggttgctgacgctgaccaataccacccagcagccgcagctgcttgcgctgcgcgaccggcaaacgcgggagaatctcttcgccgccggctggacccgcaatcagcagggcgatgagcatgatacgcgtgacctggtactgcggctggcggcgatccgcgcgcagcaggctgagctgttgggagccgctgattacgccagctgggcgctgaccgatcaaatggcggcttccccggcggaggcattgggctttatgcgtcagatcgccccggcggcgcgggcgagggcggaacgtgagctggcggacatccagcaggtgatcgacaacgaaggcgggggttttcgcgcgacggcatgggactggctttactacagtgagcaggtgcggcgggctgcctatgccattgatgacgcgcagctcaaaccctattttgccctcgagcgggtgctgcacgacggcgtcttctggacggcctcgcagctctttggtctgcgctttgttgagcgcttcgatataccggtctatcacccggatgtgcgggtctgggagatcttcgatcacaacggcgaagggatggcgctgttttacggtgactactacgctcgtgactcaaagagcggcggcgcatggatggatgtgtttgtcgaacagtcgaccctgcgcgcgcagcgcccggttatctacaatgtctgcaactacgtccgcccgcaggcagggcaaagcgcgctgctgtcgtgggatgaggtgatcaccctgtttcatgagttcggccataccctgcatgggctgttcgccagccagcgctacgccagtctctcagggaccaatacgccgcgcgattttgtcgaatttccttcgcagatcttcgaacactgggccagccagccgcaggtgtttgcccactacgcgaagcactaccagtccggggagccgatgccgcaggcgctacgcgacaatatgttgcgtgcggcaaccttcaataaagggtacgacatgagcgagctgttggctgctgcgttactcgatatgcggtggcatagcctgtcgacctcggcattaccggaggagatggacgcgtttgagcagctggtgcttcgggaagagaacctggatctggcggcggtccccccgcgctatcgcagcagctatttctcccatatcttcggcggcggctatgcggcaggctattacgcctatctgtggacccagatgctggccgacgacggctatcaatggttcgtggagcagggcggtttgacccgtgagaacggtcagcgtttccgtgaggcgattttatcacgcgggaacagcactgatttagctgaactgtatcgccagtggcgcggacacgatccgcatattgagccgatgctgaaaaatcgcgggttgagtgcgtagggcaattttagtctgacaagataaccgggcgcgctgcccggttttttgtctgatctagtcgtaaccttatatttcttttacctcacgctgcctaaatctttatcgctctctctccctttaagcattagcgtggcttcttcgatacgaatgaagcgcccggaatcatctatttcagcgaacatataaacttccatgtccacctcttctccgctgcgcctggtgcacagaacgcgatgccttgtggcataaagattcccgttacgaagttcgtcatgtaactcaattttagcgaaggcgataatttcccggagtctacgcgcatgctgagcaaagccatctaatccttcccacttgttatcagtacgctgccgataaccgggactaaaatagcgactgagtatccgatccagtggtatctgttggtggttgataatgtcatccaataccctagtaatagtaatcattttgatggttagtcctctgtgaaagtgatgaatactttacaatcgactaactggcttcagtacggtataaaagacattaaacgcctcaaacacgccaatatgcacgatccattgattccattcgaaccggtattttcaccccagggacccactttactcgtcgcggtacgtcagtctgaggtaatacgggagactccacgccaccatcacagctgtgggcagttaatcggtgccatacgtgggctacttacggtcgatggcggtgattgtcgctgggtggtaccggcaacacatgccgtctggataccgccaggtgttccgcacggcctgcgctcgcacggtccatattcaggatggagtgtttatgtttctgccaaagcctgtggcgagctacctgataagccatctgttctctcaatgacaaatctgctgcgtgaagcgataacgcgagcggctgcatggcaaggtgtagagcttactgcgtcccaaaaacgtttagctggcgttattcttgatgaaattggttcccttcccagggttaatcttgggcttccaatgccgcaagatagccgattgctcagaatcgcgcaggcgctgtcagcaaacccggacgacgggcgcaggttggaagaatgggcagcctgggccggcatgtcatcacgcacgctcacgcgacgattccgagccgaaacgggttttagcttcaatgaatggcgacagcggatacgcttactcagggctcttgagcttctggctgccggcaagccagtgacggcgatagcgctggatctgggatatgacaatgtgagtgccttcatagccttgttccgtcggatgttcggcactactccagggcggtataaaatttaattatctcttcgctgaacatgatgcgttatccgccgctttgattacgtttgtcatgggatgagaggggcaagtaattcgggcccctgatttttcacattgccgaccgcccgcgttaccgggtgccaggtaaaatcgtcggcggaaacggctccgtcgctggctatctccgccgcttccgcgccggtgacatcctgcctcatccattcccgggcggcttcaggcgccaggaccaacggccgacggtcatgaatatcgacaagaccgcgatcggcggcggccgtcacgatcaagaatccttcggcatggtccccacgttcgaacggagtccgaccaatcgcggccataaaaattggctggccatccttacgctggataaagtatggctgctttgtatttccttcctttttccactcaaaccagccgtcggcgaagcagatcgcccgtccgtgctcccacagcggcttgaacatcctgctggaggctgcagtctcaacccgggcattaatcagcggcggtttatcccaccatcctggcgcatagccccagtaaacggcatcgagatggagttgctcatcgcgttcattgaggagtaaaacttttgtcccgggcgcgacgttatagcgcccgataggcgccgggtcccaggcaatatctcgttcggccgcttcaacgagatgcgccaggtattcctcccggctttgcgcttgcgcaaaacgtccgcacatagccacctccagcgtgatgtctgactaacagtatagaacagctgcaaaacggtgttttcacctgcccaaataccacgctccttccacgtcagtagaccattatttcaggccgtcatcttgcctgacgtcgcgacagtacacgctgggcgttaggcctggcattgtccgtttatgcttcatcgtkattaccctaacgcctgtctgataaaagaaatcctttttactctttttattatctttcagaattatcgcacggagttttacctttgtctgaaatggttgtcgctgggttgtatttgaaaacatccaccccttattatttaaaaagtcatctttatcttttaaaaggttgttatgagtaacttactattattagtcctggcggtggtgttattgtttacatctttgttttttggcctgtcctatgttagagaaagaagaaaaatgaagatgcgctttaataaattccgacgttaaccgatccttcctgcggaaagcgcaagaacaacagatgagaatctcgttaactcttgtttggtagctatttggaattttttcataatatttattttgtgagagaagaccgtcttatggctgatgcccagttcttgcgctatctgctgattgttcattcccgttctgatcgcatcgataatataaagttgtgatttggtcaaggttaaccgagggcatttgacacagcgtctgctgtctttttccagcccaccgcaactagatgttgtcgactccgtcagacgttttgcaatctgattttttacgcggcgcaagtcgctgttcatgctgataaaagtggcatcgcgtagacaaagtggtaaccgttcaacctgcaaagcgctgtcggtggcgacgaaaataaaaatagacgtgtgcggagggagttttttgaaaaacgggtggcatagataatgttcaccagcggccatttctgtgaacagcatatcaatcggacctaatatatctgtggaatagtctacaacggaatacggttcacggatgtgttcttctttcgcgatctcgctaagcagttcgcaaattccgcgattaagaaatatgttttcagtgttaattaaaatatcaggcatagtcatggcgatcgtgaaagttgtcatgnnnnnnnnnnnnnnnnnnnnnnnnnnnnnnnnnnnnnnnnnnnnnnnnnnnnnnnnnnnnnnnnnnnnnnnnnnnnnnnnnnnnnnnnnnnnnnnnnnnnnnnnnnnnnnnnnnnnnnnnnnnnnnnttttttagcgttgcgcgggcatgatcgctaatttggcacaaactgcttaaattgcttatattgcatgcgttaattcnggtctcaaatatattaatcagaatgacttattcactgtatgaattgctttttcaaaaataccttttgcaggcgtgggtccttgaggagattgcgcctgagcgaaacctggggtggtcattgataaaaaggggcggggtagacccgccgctgcggagggtgaacagcaacggcgtacaacagaatcagttatcaggattgttggaaatgcttttccacaccattcccaggccgatcaacatcgacgcgaagagggcgaacagggtggttgagataaaaatgctggccatggcggtgcctcagaaagtgcgtatgcagatcattaggcacggtgtcggatgaaaggttccttacccggccgggtatattttcaccagcggcgtccggttgacggcaacaaggcgaatgccacgtcgaagcgccgctgttggcaaggggaccctgagaggcagccgtgttgctaaacgcgctgttcatggggagaatacacgacggcaaagggggagcgattcggacgttgacatccccttaaacaagttatatatacatgtcgcttctgtttattgaatgttaaacagcatcagttatgggactcagaagcgccacagcccccgccgtcgggcgggggtaacttcgccaccggcatgcttatttttcactgaggctggcgaagaaaaattttttatttcgggtcttgaaaaacgcgccttagatattattttatatagcggacaagcaatgcttgcctttatgttgagcttttgaatggatattcaggaggttaattatggcactcaaaaccttgtcagcactcccggtatttgctgattctctttttgccgatcgctttaatcgtattgaccgtcttttcagccagttaacgggcgatacgccggtgggcactttaccggcttatgatttacagaaagtcgacgacagcaatttcctgctcagcgtcagcgtgcctggctggaaagatgatgagctggaaatagaaaccgtaggggggaatctgcatatttccgggaaacgccaggaaaccgattcctcgacagacagcggtgaacgctggatttataaaggtatccgccgcgctaatttccagctcagtttctctcttcctgaacacgcccaaattaatcaggcgcagctggatagcggcatcttaaaaatagccatccaccaggaaatcccggagagcgaaaaaccgcgtaaaattgcgatcgagaatcagggacgcgtgatagaacataaagtttgattcaccgttgttccgacgatgttaccttaaaggcccgccctgcgggcctttatcctttccccctgaaaatataaatggccccccgacgacaaagaaatcgatatgctattctgttaacagacgcagtgagtctgctatttctttcaatttcggcgaggaggaagaatgactgacgagatcgatagcgacgcaaacaatacgcatgaactaaccgctgaagtggctcgggcgctgatcgcgcgcggttggcgactgaccacggcggagtcctgcaccggagggaatctggcggcagcgctctgtgcccaggcggataccgcggcattttatgataccggcgtagtgaccttcagcgatgaagccaagcgcaacgtgctgcaggttcgcgcggaaaccctggcggtacacagcgccgtcagcgaagcctgcgttcaggagatgtcctctggtattctggcgctcgccggggccgatatcgccatcgccgtcagcggctacgccggaccggagggcggggaagatggtacccccgccggcacggtatggtttgcctggaattttcgcggccagactgaaaccaaacggatgtgctttgccggcgactgtgagaccgtggtggcgaaagcggtacgatatgccctggcggcgctgagcgaaaagcttgcccactggcagtgacgatgcccgggtgcgcggccttacaggtccattgcctggcgcgctaccggccagcagatctcgccgatgccgttaaggcagggtcgggaaaagagaaagccctgaaacaggcgaatgcccaccgactgcagccagcaccactcctccagggtttcgacaccttcagccaccaccgtaatgccaagatcctcgcagcagcggacgaccgaggcgacaatcgcctgtttggtgccgctaatatggatatcgcgcaccagttccgcatccactttgattttatcaggctgaaaacgggtcagtaacgacaggccggaataacctgcgccaaagtcgtcgatggccagcttcatgcccgcgacgcgcagggctttgagcaccttgcggaactggtcaaagcaggtgatcacctctgtctcggtcacctcgatcagtacctgatccggtctgaggccggccgccagcaggctgtccatcagccagcctacggcgtcagggtggtgatacagcgatccgggcaacaggttaatcgccagctgatgtttcccgagcggcagctggccggcgagagcgaatgcatacgctttgctttcaagatcaaaacggtagcgatcctccgccgcaatggcagcaaacatttccacgggagagccgccggttgggctgcggatcagagcctcaaaggaagaaactcgctttttagccggctcgacaatagcctgcagagcaaactggcaaggttgaccgggcaggtgctgcggcgcggccgtacctgacgcgggcatcatcatccagcgagagggctgcagcggctcgggcaggcaatagcggccgccgtcggcaatgaaggcgctaagcagccggaacatccggtcgttgaccggttcggtgaccccaaacgtgctaaagcgcagaatttcctccagcgcgccatcggtttcaaacagccggagatccagtatgcgcattccggtgccgtgaaaacgtcggtaggctgagtaatcgcgcatcagctccactacgtcgcgatgacgcgggtcgctttggatttcgctgaacagcgactcaagtgcctcctcagtcccttccaggacctggaaaaactgcaggccgttaaacagcagaatgccggtgatgccaaggggcaaatttttactgctggcgcgatggactaaagcgtcgagatcgacgggcgggcggtcaggatgaacctggctgcggtaaatcagggtggttagcatagttgttacgatcgctcccgcggcgtaagaacatccgcgctcagcatgcaagatgagtatggcctgaccctaaaggagggcgaggctgatatgtacaaacattcaaccaaccgtgatgtccgctacgcggaacgcgagcttcactttgtgattccctccactgtacagggaattacacatttggctatctttttctcatcctcaatgcaaaaagacgctaacaggcctctcattccttcctcagacactggcgctgcgtcttattttacctgttaatattcgctaccaggaattatcctaccattctatttcccactctcaaaaatgaggcgctggtcttgcctgaatataatcgagtgaatattatcactctaaattaaattcttttgtcaggtttgatatgagcgacttctttattattttgtgtctgattttatgtcccatcatttctttatggagtggcttttcctatattcaggaaaggcgcaagagacggtatgttttccgttccagaagatgattgtttgacagaataaaatgacgagttgtatcagcgtttggcgagcagttgcacaaggttgttaaactgctggcggctattcaaattaaatttactcataatattctttttatgtgaatggatcgttttgggactaatatttagcgcagcggcgacttcatgcgggctcaggccaatactgaacgcgtaaatgactttggtttgcgcgtcgctgaccgacctgcaggcgcaattaatgcaacgccgcagacgattgaacggcggatcttgccgcggtagcagcggacgttcaatggcgttagctatctcatctttcagccgctgaacgcgagcgtgaggcggcataaataccgcatgctgaagacaattcggtaaaccctcatctacggtagcgtgttcattgtccgggaaaataaaaagcgtatattgttccggggcatgctgaaaaagatcctggcacaagtaccactcccccgcgaccatttccgtgaatatcacatcagcttgcgccatcgatcctgcatcccattgttgagaaaactgatagtgtggccgcccggcggccttcatcgcttcatcaaccagttcagcaatagcgactcgcaaatagtgattttttatattgaacaaaaaattagtcatataacttccctgtgggcattaaaaaacatatctggataaattaaagaatataatgatgatgcaggtactatttttagccgtggtaatctaagggatgttttccattaatgcaatatctggtggggaaagtgagataacggtatattgatatgcgaaagttcctaataaacaaaaccttaagcatatatttgtaactatttaaagccgtttgctgtttttttatttttgcgatgcataaaaagcttagtgatagccgcgctctgttgttaaaattagcggaggacaagaatacaggatgtatgccgtacttatgaagcagatgctctatttgaaaatgctggcgtggctggaggataatatctattgtaacccggcgatcgatgacctggcgctgtatatgggctattcacgtcggtttgtgtacgacgtgttttaccagtatggccagttacccatcgggcagtatattcgtctgcggcggttgaccatcgcagcggtcagtctgcgcttaacacgacaaccgatcgccgctattgcctggcagttaagctatgactcgccgcagaccttttcccgggagtttaagaagcgcttttcgctctcgccacgtgaataccgttgcgcggcgcactgggacacggcaaagctgttgaaaaagtttcacccggacggagagagcctacctctggctcgttttttttctctgccggaacaggtctattacggctatccaatgaagtatgaactgcgcctgtcggatttggtgttgcaaagcaccgctaagacgagcatcagacaaaaggttgaccgttttttcaccgctggcggaggctcgctttccgtactttccgactacgccgcggcgagtaaaaatgagcttaacgtcgaggttaacgcttttgtcggctgtcatgaggcgggaaagctgccccccgcgctggccatgaacagctcgctgaccacccggtcagggctttatgtcggggttgaattctacggcagctggtcacgttatgctcgtttatccagcgatctgtatatggagctgctgccatccctgggggtaagtcgtcgggacggctatgacattgaatgttttataacccgccatgcggaaggcgaagaggcaggggacaggcgctatcgcgtacgctattttatcccggtgacgctgtcggcagcgggtctgcggtctgacagcggtagtgggtcagggcctgcgccggggcgaagttaaggtggccggagccacccaggttaacatcaaagcgcaaaccacagcagccaggtgatgagaaagcccgtcacccccatgatggttgtcaagacggtccaggttttgagtccatccggcaccgagagtccgagatagcgcgtgacgacccagaatccggcgtcgttgacgtgcgacagcccgagcgagccgaagcaggtcgccagcgtcaccagcaccagttgcagcggctccagaccgacaaccgcctgcgacagcagaccggaggtggtgaggatcgccacggtggccgaaccctgcgaggctctgagcaccagcgatagcagaaaagcggcgggcatcagcggcagatgtattgtctccagcgcctcggctaaggcattaccgatgccggaagcgaccagtacgccgccaaaggcgccgccggcgccggcgacgaggatcacgtccgccgacgaggggatcgcgctgccggtgacttcgcccagctttttcaggctcatccgccgacggatgcccagcgtccagctggccaggcccagggagatcagcagggcgaccggcggggtaccaatgacggtcatcagctggcgaaccgcgttttccggcagcagaagcgcctgacacagcgtcccggaaacaatcagcatgatgggcaccacgatcagcccaccgataaccagcgcattcggcggcggcagacgggtctgctgcgcgttaaccgagagatccggtacttccgccgtttgttgctgctccagcacgttaatcgacagatgataatggcgccgattgataaaccgggcgacaaaatagcccacgataccgacgaccaccgacaccccaatccccgccagcatcagccaaccgacatcgctatgcagaatgcctgccgcagccgctgcgccaggatgggtgggcagcgccacgtggacggttaacatcacgccggccatcggcaggccaaacttcagcggcgatacgtgggcgactttgctgaagccgtagattaacggaatgatgatgataaagccgacttcaaaaaagaccggggtgccgagaataaaagccacgatggttaaggcggcaatggttcgttttgcacccagtacgccggtcaacgttttcgccagcgattcggcgccgccggacatttcaatcagtacccccagcattgagcccagaataataatgctggcgatgtggccaagcaggccgcccatgcctttttcaatggtggttataattttatctgccggaatgccggtggcgaatgccaccagcagactgacgatcaggagcgccacaaaaggatgtgctttcgctttgatcactaacaggagcaacagcactacgctggctaacgcaataagtaacagcgccgatgtcgacataggtttgcctcgggtattaacaggtgtacagagagttatttttttagaaaacggcgtttattttttccggtagggcgagaaccaccccagcccggaaagcgtgtctgtccgggggatatattcgcagccgatccagccgtcataaccggttttatccagtagcgcatagagccacggatagtttatttcgccctcatccggttcatgacggtcgggcagggaggcaatctgaatatggcgatactggccggcatattcggtaataagatggcttaaattgccgtccaccttctgcgcgtgaaacagatctaactgcaccgccaggttcggcctgtcgacccgtttcaccatcgccagcgtctgatattgactgtggtagagatagcccggtttggtctgcggattcagtgcttcgatgagtatccgcttgtcgtggcgggcaaagcactccgcggcgtagcgcagattatcgataagcacggcctcgcagtctgcgcgatccgctcccggcggcaccacgccggccatgatatgcacgtgcgggcaactgagctggcaggcatactccagcgccagctcaatatcgcgtcgggcctccgcgcttctcccgggaatggcggcgagcccccaatctccggcgttgacgtcgccgggtggggtattgaacagcaccagctgcagctggttctcctgcaggcgctgtctgatttccccggcggcatactcatagggaaacagaaactcaacggcttcaaatcccgcccgggcagcggcggcaaagcgttccaggaacggcagttcggtaaacagcatggataaatttgcagcgaattttggcatggttttatctcagttctttcacttcgtcagcggtcaggtagcggatctcgcggttgccgagggtaaatatcagccgtgcggtctcttccagttcctcggtattgttggtggcttcgcgcagcgatgagccagtaaccaccggtccgtggttggccagtaaaaaggcgttatagcggggcgccagcccggccagcgcctgggcaatacggtcatcgcccggccggtagtagggaaccaccgggacgtcgccgacgcgcatcaccacatagggggtaaaggggcggatacagttgtgcggatcgagcccctgcaggcaggagagcgcggtcagatagtggctgtgcaagtggacgatcgccttgcaggccgggttgtgcaaatagactgcccggtgaaaagtgacctctttcgacggtttgtcgccggagatccattctccttgcagcgtcaccaccgacaaccgctgagcctgcagttcgccgaggcaggcgccggtcggcgtcgccagcaggttgccgtccggtagcagcagcgacagattgccagcggagccggtggcatagccgcggctaaacaacgaggcgccaatctgcaccatttcctctcgcagttgttgctcagtcatgacgaaactcctgctgggcacgggcaaagaactggatatcgccgaagttacctgacttcagcgccagggagagcggctggcgggtgtcacgcacccagggcacgctaggggagatggtcggcccaatatggaacgcctcaacccccagggtctgcgccacaatgctcgacgtttcccctccggccacaataaagcgggtaaatcctttcgccttcagggcggcggcaagagcggcaaacagctgttccacccgttcgctgctggccttgtcgccatactgcgcctggatccgctgcagcgtttgcggctcggtggtggcatagatcatcggcgccagcggcgcatcgcgctgcgcgtccacccagtcagtcagcgtcctgacgtagctctccagatcggtaaagcaggcgcttaagtcgacggcgcgggcgggagcctgttgacgataggccgccacctggctgttggtcatcaccgagcaggagcccgagagcaccaccgccgggccagccagcggcatgccggcctgagcgctttcaccccgggcgccatggcgctgcgcccagtcgcgggcgaggccgatggcgaggccggaaccgccggagaccagcttcatctcccgcagcgccacgccctgggtgagcagatcctgttcgctgagggcgtcgagcaccacatagcgcaccgccggatcgttgactgccgccagcgcggcggcgaccgcctccggcccccgggcgacaatcggccaggcaatcagcgcggcttttccgcgcccctggcgctcaattaagcggcccaggtgcgcatcctccatcggcgtcaccggatggtggcgcatcccggactcattcagcagttgctcgccgacgaacagatatccctgatagaccgtgcggccgttaaccggcagcgccggggaaatcatcgtccgcgtctcacccagctcggccagcagggcatccagcaccgggccaatgttgccctgcgcggtgctgtcgaaagtggaacagtacttgaaataaaactgctgacagccctgggcctgcagccagcgcagggccgccagcgactggctgacggccatttccgccgggcaggagcgagttttcaggctgatgaccaccgcctcgctggtcagcggaagatcgcgggtcggcacgccattcagttgcaccgtcggcatgccgttgcgcacgaggaagctggaaatatccgtggcgccggtgaagtcatcggcaatgacaccaagctgcatgttgtctctcctcactgtttatggcccggcagggtgatgccgttgaaaatcttgatcaccgcgctgtcatcttcccgaccgaatccggcattactggcggaggtgaacatattcagcgcggtggtagcgagcggcagcgggaaggtcagcgcccgggcagtgtcattcaccagcccgagatctttgacaaaaatatcgacagcggattttggcgagtaatcgccatccaggacgtgctgcatgcgattctcaaacatccaggaattacccgccgcgtgggtgaccacgtcatacatcgtctccagtgggatcccggcgcgggcggcaagcgccatcgcttcggcggcaacggcgatgtgcaccccggccagcagctgatggataatttttaccgtcgagccaagaccaatgtcgctcccgatgcggtagactttgccggccacggcgtccagcaccggcgcgaggcgggcaaaggcggcatcgctcccggaggccatcaccgtcatgtcgccggcggccgctttcacggcgccgcccgataccggcgcgtcgagcatcaatagctggtactccgccagcgcctcggcaatggcctgagcatcggcggaggcgatggtggacgacaccatcacgacggtgcccggcttcagatgggcggcgaggccgctctcgccgaacaggatcccccgcacctgggcggcattgaccaccagcagcacaactgcatccagttccgcggcgaacggcaccgcgctggggcccgcgcctttggcgcccaccgccagcagtgcgcgacagttgtcgggattgatgtcaacgccccaggtgttcaggcccgcctgcaggcaggcgcgggcggcgcccatgcccattgaacccagtccaatcacgcagacgttagtgtgtgcagccatgctggtctccttgtgaacattagttaattaatgtgatttaatgatagaataaagcgttatcatgtgaatttatgtgagagttatcacgaataacccacatgaatataaaaaattcacaggcggaaagaggctgcacagcggcgattcttgccctaaaatagcgtaaaaaacagcggcaaagcgcgataacaacaccgggtgtcgccaggcccgtagcctgggtggtgacgcctggtgtgaaaaaatggtaaggggagagcggtgattccaatagaacgacatcagcgtattttagccctggtggagcagcgtggggcggtaagcattaacgagctgacggagatcctcggcgtgtcccatatgaccatccgtcgggacgttagtaaactggaggagcaggggctgctggtcagcgtctcgggcggcgtgcgcgccgtcagccggctggccgcggaacccagtcatctggtgaaaagcacgctgcagagtgaggagaaacaggcgatcggcgcgctggcggcgagtcatatcgccaaaaacagttgcatttatctggatgccgggactaccaccctggcgctggcgcgggcgatcctcgaccggaacgatctccaggtggtcaccaatgattttgagataacccagctgctgatcgatgccagccagtgcggcgtgatccacaccggcggcactctgtgccgggagaaccgctcctgcgtgggcgaatcggcggcgcgtacgttacgccacctggctatcgatacggcctttatctccgccagcggctgggacagtcgcgggattttcacccctgatgagaacaaggttaccgtcaaggagaccgtcagccaggtcagcgcgagaagcatcctgctgtgcgacagttcgaaatacaatcaggtggccacgttcatggcgttacctctgacccggttcaccaccatcattaccgaccggcatctctccgatgccgccgccagtcatatcgcccggcacgcctgcgaggtgctgcgggccggataacgcgcgcggccaccgccgggttagcgttgccagtgctcgatcagcgccgcgccgatcccggcgatttgctgatttcgctcggccatgctcgccggcgtatcccgcagataaatcaccacgatgcgctctgctttgttattcgggccaagcagggcgacaatcccgcgcgcaccccgttcgccagctccggtcttatcggcgataaaccagcccgccggcagcacggagcggatcaacggtccggcgacccgatcgtccaccatccactgcagcagctgccgttgcgaacgggcgctcagacgctggctggtcagcagcttgcgcagggtcgcggccatgctggccggggtagtggtgtcgcgggcgtcgccgggaagcgcctcattcagttccgtttcccagcggtcaaggcgggtgacgttgtcgccgatctggcgcaaaaaggcagtcaatcctgcggggccgccgacggtggccagcagcagattggcggcgctgttatcgctcatggtaatggcggcggcacagagttcgccgaccgtcatgccgtcggcaagatgtttttcgctgaccggcgagtagtccaccagatcctgctggcgatagtggatctttcgctccagctgttcgtcaccggcatccacccgcgccagcactgcgccgcagagcactactttaaaggtgctcatcatgggaaagcgttcatcggcgcgccaggcggtcagcgtgcggccgctggccagatccatttctatcatgcctacgcggcccgacagctggctttcgcttagtttaatttgctcaagcggctgcgggctggcgtgtaccgccagcggcagggtggctaacagggagataatacacaggcgaatataacgcataaccacaatacatccttgagtgagggccgataaaggcgagtaaagaagcgacaaataagaataacccggcgttttgctgattcacaattcctcttttttccttcatcatttgtcatcttttatttcgaataatcaatatctagccctgcctaagcacgctattttttgactcaaggccgtgatggactataagaaagtactaaataccgcactctgtcgggcgtcgctgtttgccgatcaccacgcccgccggtccctgcggttcgccaacgctatatgccatcccgggaggaactggtgcacccgataattaaggtcatgctggtgggcggtaaggcggacgggctgttggtcagcgtcgccgatgacgcgaccgaggtctcggtgacgcctgcgcagtacggtgcgctatccgggcaaccgttgagctaccgaattgttagccaaaccattgacgatgaacgctatttttttggcgttttcagcgacgcccatcaggatagcgataagctgacgcgggtcgccctgacccgtggaatgaaaaaaatgttctgttaaaccctgcccgaaagggggcgtaagagggtgtgccgggcgccgctgtgctactgtggcagccttctatttccagggtcggacgcataatgattcagtacattcgtattcaaaattttcgctcagtgaaggatatcgcgctggagctcgggccgctgaacattgtcttcggccctaacggctgcggtaaatccaatatttataacgccatccacctgctgaccgctgccgctgagggcaggctttcggggtttatcagcgaagagggcggtctggagaatatgatgtggtccggggagcgttcgcccctcgatcgtcacccccgccggctgcaaatcgcctgccggaccgacagcttcgattatgaactgcagataggcttccctgaaaaattgccctatccgacgcaattcatgctcgatcctatcgttaaagaagagaatatctggctggccggctactcccgccggccttcctcccgcgtactgcagcgcaagaatcaggcggcgtttctcgtcgatgtcaccggggagaaaagtactttcaccgagagtatttatgaaaatgagtcggtgttcggtcagcttggcgagccgcaccgttttcccgaagtatcgcgagtgcgggagacgctgcgccgttggcggttttatcatgaattcgcgattggccggcattcgccgctgcgtcagccggccgtgggttaccgttcgccagtcctcgacagcgatggccagaatctcgccgccgcctttcagaccattgtcgagatcggcgcggaggagattttgcatgaaatccttgccgacgcctttcccggctgccagttttattgtgaaaacgagcactcgcgtttcgctctgaaaatgcgtcgcgaagggatccgccgcccgctgctggcggcggagatgtccgacggtacgctgcgctttttgtgcctcgccgtcgcgctgctcagtccacgcccgccggcgtttctggcgatcaatgaaccggagaacagcctgcatcgcgacatgttgcccgcgctggcccggctgattatcgaggcctcgcgctacagccagatctggctgaccagccactcggcggagctggcggagcttatcgccgccggggcgccttgtcagcgctatgcgctggagaatcgcggcggggagacgcggattgtcgagtgaagcccgtcatccctgacgggggcgctggagtcaggcggggctctgcgtctctgcggtcggcagcagacggttgccgccgcgtagggtgacgaacgagagcagggtgaagctcagggtcatgcagccgaggatcagataggcctgatggaagccgacggtgtcgtacatccggcccacccaggcggaaagcaccaccccggacaactgttttgacagattaaaaccgatcaggaacagggtggccgagaggcgcgggttaaaggcggaagagatatatttaaaagttcccaccagcaggaaggggatctcaaacatatgcagcatcttgaggatcaccacctcgactgccgatgaggcgaaggacgacccgagaatacgcaccgacatgatcatccccgcggtcagcagggcgtttttggcgccgatgcggttaacgatggccggcgcgcagaacatgatcagcgcgttgagcaactcgccgccggtggtgacgaagccaaacacttcggtaccgcgctgcggactggcgaaaaagcttttgaaaaagttggcgaactgctggtcaaacacgtcgtagacgctggcgacacccaccacatagacgataaagccccagaagcgcggcatacgcagcagctctgccgccgtacgcagcgaaaaggcctggcgattggcgcccagcgcctcgataacctgggcgctgttgctgctttccggccgcgacagccagagcagcagaccgagcaccagcgcaaagccggaggcgatccagaaggtgatattgggatcgatgccgaacagcacgccggttatcgaggcgcatagcgcccagccgacgcagcctgcgacccgcactttgccatattcaaagcggttggcccggctgacgcgttcgatataagcttccaccgccccggagccgctggagaaaacaatccccaggtagatcccgcctaccagcgaaccagcgataatattcatctgcagcagcggagagaaaacgaaaataaagaatggcgcgaacagaattaacaataccgtaatggtccacagcagatgtttgcgcaggccgagcttatccgacatcaggccgaacaccggctgaaaaataatggcgaataacgagatagacgagaaaacgatcccggtttccgttttagttaaatggttaacgtccgccagccacaccggaaaaaacgggaagtaggccgacataatgaaatagtaaaagaaaaagaacagcaggaaatagacgaaattatgccgttctcgtggcgccagttctgagaatttcatcaccatgatcccttgttattctgtttgtggggtgggggctgtcgcccccacggattaaaagcaacgcaatgagacctcgtactgccagcgcgtttggctcaggagccactgcggcagcacgctgggggtccaggagtcatcgcctcccacccccatatgcaggccgtcgagggtgatccacacgccgtcttcggcctgcatcttgtgccagtggtcggtctccatcagctgacgggtgctccatggctgaacggagaagtggaaatgtccgctgatgtgccagcgcccccagtccagcgcctgggtatcacagcgcaggccgttttccgtcgggaagatatagggggtggtcatcgccgccagcggctgctcccagcgggcgaagcaggcgctgctccgccggtcggggtagttctcatgcggccccagacccagccagctcaccggcgcctgctgatccgccacctggaagtgcagcccgacccgcggcagcggcggcagggtttccgcccgttcgccgtccaccgccaaccgcagggttccgtcagcagtgaagtgcatgcgccagtggctgacaatcactacctcttcgccgcgcaggtagtgccagcggcagtcgacgagggtttcatttgccaggcgctgcgcatcgcactggacgcagtgcgcctcaagatcgtacaggccggcgcttttccagcgctccacccaggcgttggggtcgatacgctctacttcgctgaccccgatgtcgttgtcgagcggcgcgcgaataaactggtcacgcaggggggtcaacagctgctcctgaccgccaaccgaccagcggctcagcagacccgtccggcgatcgatggtccagcattgcgaaccggcgcggatctgccagacctcatcgctgacgataagatccggagcgccggcagacacggtgggcgccggcagcgccagcggggcgggcaggggaaactgttgccaggcgacgcggtgctccgcttctgaccaggcggtcgcctggggctgggtcacctccagcgtcagccacaccgcgcgggcgccttcaggcaggatcaggctatcgagcagcgttatctcgtcgctgccctcagggggcagcgccagggtcaggtcgccgtgatacaggggttcaccggccgcctgcacctgccagcgcagcacttcgttatcggttgggcggaacaggtattcgctgatgatgcgcacccgcagcggcgaggtcgacagcagcgtgaactgaaaatactgctgggcgtgcttcgcctccaccagcgacggatgcggcgtgcgatcgggaaacaccagaccgttcatacagaactggcgatcgttaggcttatcaccaaagtcgccgccataggcccagccgacgctgccgtcggcaaaggttttgcggatcgcctggtcggcccagtcccagataaacccgccctgcagccgcggatactcgcgaaaggcctgccagtaatcggcgaagttgccgaggctgttgcccatcgcgtgggcgtactcgcaaaggatcagcggccgctgctcaccgggcaggctgatccattttttgatcccccatttggggaccgccgggatcggctggtcgcgttcgatgcgggcgtacatcggacagataatatcggtggcggtggtatccgcgccgccgccctcgtactgcaccggacggctcggatcgttgcgtttcagccagtggtacagcgcttcgtggttgccgccgccgccggactcgttgcccagcgaccagatgataatgcacggatggttgcggttgctctgtaccatccgggtgacgcgggcgctgaaggctggtagccacgccggatcgtcggacagccgattcatcggcaccatcccgtgggtttcaatattggcttcatcgaccacgtacagaccgtagcggttgcagagttcataccagcgcggcgcgttgggatagtgcgagcagcgcacggcgttaaagttgttctgcttcatcaacagaatgtcctgcaccatatccgcctcggtgaccacctgcccgcgcaaatgatgatgctcatggcggttaacgccgcggatcagcagcggtttaccgttgagacgcagcaggccatcggcaatctcgatgcggcgaaaaccgatgtcccacgcttcggcctccagcagttcgtcgccgcgccacagggtgaccacggcgcgataacagttcggggtttccgcgctccagtgcgccggcgtcgccaccgccagggagaaatcgacccgttccgcgtagtggccgcgctcatccaccgtcggggtacctaacggctgccgcccggcggcgatctgctcctcgccgcgccacaggctaaccccgacgctgagcccggcaagcgccgcctcagtcgcttcgatggtcgcctggacctgcagagtgccgtcgcgatagagggcgtcaagggctggcgtcaactgcacgtcgcatagccgttgctgcggcttattcagcagccataccgagcggaaaatgccgctcatccgccacatatcctggtcttccagccagctgccggcgctccagcgcatgaccatcacgcacaggcggttgtcgcccggacgcaggaaggggctgagatcgaacgccgccggcaggcgactgtcctgcgaatagccgacccacacgccattgcaccacagatgaaacgccgagttgacgccatcgaaaataatctgcgtttgcccgttctcgcgccatgtgtcctcaaccgtaaagtgcagggagtagcagccggtcgggttatcctccggcacccgcggtggggtggtgtcgatgggatagcggacgttggtgtagatcggcgcgtcatagccctccatctgccagttggaaggcacaggcgtgccgcggcagtccggtagatcctgcgtcaaccactgcgcatcgacggcaaacgggctacgggcgtaagagaactgccactcgccgtccagttgacggcggcgggatgaaggtaggttatcgcgggcggcaagctcatcgcgccagctggcgaaaacgggatgcgctggcaggcggttaaggtgggtaatggtctggttctgccagtcttcacgggcgaggacggcgtgaaagtcaggagtgtggctgcggccggtatcgctaatttgcatattaaaccccggtaagtcataaattgtcgttcgctaaacaggatgattaacgttatcgggtaatttgttttgtccagcaatctcgggggaatcgaaattaacagacgatcacgaaagcgggggcgaagcgctgttttttgtcgcgcgttaaacataaaatgttagcgcacgacattgttattgctgaggagaaaagatgccgcgtcgtaccgcaaccctggaggatgtcgcccgcgccgcgggcgtgtcccagcagacggtctcccgggtgctgaaccgtcctgaggtggtgtcagcccgcacccgcgagcaggtgatccgcgcgatgcaggcgctgcactatgtgcctaaccgctcagcgcagctgcttgccggcaaagcggcgccctccatcgggctgattaccgcctcgctgacgctgcacgcccctcgcagatcgccgccgcgataaagagccatgccagcctgcatcagctggaagtggcgatagcgatgccggcgcaggctgattttgtcgcgctgcaggcccggctggacgagctgcgcgctcagcatattcgcggggtgatcgtcagtctgccgctggagagcgccactgccgagcggctggtgcaagacaatccggatatggcctgcctgtttctcgatgtctccccggaggccgatgtctgctgcgtgcgcttcgaccaccgcgacggctgcggggcctgcgtgcgccacctgtgggagctggggcatcgcgaatttggtctgctggcgggaccggaaagttcggtttccgcccgtctgcgtctcgccagctggcgcgaggcgttgcacagtctgaatattgcccgctctactacggtgtttggcgactggagcgccgccagcggttggcagaaaactttcgagctcctccacctgcagccgcggatcagcgccatagtggtggcaaacgatcagatggcgctcggcgtgctcagcgcgctggcccagctcaatcgcagcggcagccaggcggtatcggtgaccggctacgatgacaccgccgacagcctttacttccagccgccgctcaccacggtggcgcaggacttcgatctgttgggcaaaagggcggtggagcggctgattgccctgatggcggccccgcagctgcggatccgcgagctgctgccgacccggctcatcgtgcgccagtcggcctggcctgtcgccgccgcggaggaccggcagcagaccctggcgcagctgaaagcgctggtggagaagctttagctgctggtcgttgaggctttattgaagttgagcatgctaacttcggcagcaaacgtagagaggtaaagcttatctgtctgcgaaaaatgcaaaacacaatctatccatgcaagcattgatttaccgccagtcatatggcggtttttttttgccccttccaccctgtaccgactgcttcagtccggctttccatctggcatatcctgccgcggcatgctagatcttgcttccgggagacgacgggagacaaggtcatgatggtgattgagggtaaagaggcgatcgtgcgggtggactggcagcgagtgcgaacgatcatcgccgaggccgggctgaatgagcgtgatgttcagcaactggagcaggcgttccgccagagcaccttctgctggtttggctatgagaacggtcagctgattgccgtggcgcgagccatcagcgactgcacctggagcagctatctggcggatgtggcgatcgtccccgctcgtcagggacagggctacgggcaacagctgatgctggccatccgggagcaactcctgccctttggcaaaatatttatctatgcggtggccgataaaattacgttttatcagcgctttggctttgccatgttgactaccggcatggtctgcgccagcgaggaaggcatgcagaaaatgcaggagcagggctatatccgtcagccctgaaaggtgacgcttagaaacgcctggcttaaacgtgtaaaccaggcgcaggctgtcagagggggcgttcgagcacgaaaagatacgcttcccgcgaccagaacagggcggtacggcggcgctccaccgacatggttttcacttcccatccctcacgggtatagctgctgagaaactggctcattttgtcagggtcggccttggcttcgccaaaaaacagactgcccagcagcccctctttatagatcactacccgacactctttcttcatcatcgaccctcctggcgaccggtttactgtggccgtctattgtccgtggctgcgacgattttgcaatcggagaaggcgtaaactgtttacggtactgcagcgggctgagcgcgaagtgctggcgaaaatggtggcgcagggtgccggcgctggcaaacccgcagcgctcagcgatctgatcgatgcccatcgtgctctccgtcaggtgctggcgggcgcgcagcagtcgttcctccagcagccagcgggcgggcgttttaccggtggcctcctcaaagcggcgcaaaaaggtgcgcgtccccatgccggcgcgctgggcgagggaagcgacggtatggctggcggcaagatgctggtgcagatagtcaaacagctgaccgaggcgcaggctctcccggctgcgggctaccgggcgcaggacctgctgcgcctgaccgccgtcgcgatggggagagacgaccaggcggcgggcgacgacgttggcggcttcgctgccgaaatcttcgcgcaccagatgcagacaaaggtcgatccccgccgcgctgccggcggaagtcatcagcaaagcatcgcccacgtaaaggacgtcctccaccacctggatctgcggaaaacgggactgcagcgccgcagtgtagcgccagtgggttgtcgcctggcggccattgagcagcccggcggcggcgagaacgaacaccccggaacagatagaaataatccgacatccgcgggcgtgggcggaagccagcgcggcgcacagcgcctcggggaccggggcgtcgacgccgcgccagccggggaccacaatcgtatccgcctgggcgagaagttcaggaccgccgtcggtcatcaggcggatgccgccggtagcgcacagcggcccttcatcgacggcggcgacggcgaactgataccagttgtcgcccatttccgggcgcggcaggccgaagatctccacggctacgccaaactcaaaggtgcacaggccatcgtaggcgagggcgaccacctgatgacgtgacggtgtcacagaaggggttgtcaggatgttagcgttttctgtcatggttgtcggcagatcagggtgatgggcgtcagtaaagtagtgttatcacagacaaggagaagacgccatgagtgtagtaacccaatttacccccgccacctccgctgaggctatccgctggttcagccataagctgcatcttgagaccgactgcgccgatgtgcacagcgcccagcgtgccggcgaggtcgactttgtcctgctgcacgtggtcggcagcgaggaagccttcgccagacgtcacctgccaggcgcgcagcatctcccgcacagccagatcaccgccgagcgaatggcggcctggccggcggagaccctctttgtggtctactgcgccgggccgcactgcaacggtgctgacgttgccgcgctgaagctggccgagctggggcggccggtgaaaatgatgctcggcggactcaccggctgggaagatgagggctatgcgtttgtttccggtaaatgaaaatttttcatgtaccatgaaatattctcgtttgcgacccaccactctgcatgccagtatctggacatatagccatccagaagtctaaaattcaaataatgaactatcacggtgggcaactaacgcgcccaccgctaaggagacagcatgcaacgtcaacaggccccgttccgcgcagacatcgtcggcagttttttgcgcccggacagcattaaacaggcgcgtcagcagctggctgaggggattatcgacgccgctcagctacgcgagattgagaataacgcgatccgtcatctggttcagcagcaatgcgactgcggcctgcatgtggtcaccgacggtgagtttcgtcgcgcatggtggcatttcgatttcttcgatggcctgcagggcgttgaacgttacgatgccgagcaggggatccagttcaacggcgtgcagaccaaagcgcacggcgttcgcgtcaccggcaagctggcgtttggcgaccacccgatgctggaggatttccgctatctgaaaagcatcagcggcgacgcgcagccgaagatgaccattcccagcccgagcgtgctgcacttccgcggcgggcggaaagatatcgatgccacggtctacccggatcttagcgactacttcgacgatctggccaccacctggcgcgacgccatccgcgcgttttatgacgccggctgccgctatctgcagctggacgataccgtgtgggcctatctgtgctccgatgcccagcgccagcaggtacgcgagcgcggcgaggatccggatgcgctggcgcgtatttatgcccgggtgctgaaccaggcgctggagggtaagccggccgatctgacggtgggcctgcacgtctgccggggtaacttccgttcaacctggatctcggaaggcggttacgagccggttgccgaggtgctgtttggcggcgttaatgtcgatgccttcttcctggagtacgacaacgaccgctccggggatttcgcgccgctgcgctttattcgtcccggccatcagcaggtggtcctcgggctgatcaccaccaaaaacggcgagctggagaatccgcagggggtaaaagcgcgtctcgccgaggccgcgcagtacgtgccgctcgagcagatctgcctcagtccgcagtgcggtttcgcctccactgaagaggggaatgccctcagcgaagaccagcaatggcaaaaggtccgtctggtgacctccatcgccgccgacgtctggtaattgctttcttagcgcagcgttgcaccgtgatgaggcaacgctgccatcctcttcgccactatcgcccacctgcgccgcatcctgctgttttcacaacctggcaccttttatgccttatcacctctggttagctgttaattctttattttttgcgctactcaggagtgaatcatgcaacgtagaacgttattaaaagcttttgcactctccgcctctgttatggctatgggtctctccttccaggcctatgccgccgacaccatcaaagtcgggatcatgcattcgctctccgggacgatggcgatttccgaaacgccgctgaaagacgtcgcgctgatggccatcgacgacatcaacgccaaaggcggggtgctgggcaagaaactggagccggtggtggtcgacccggcctccaactggccgctgtttgccgagaaggcgcgccagctgctggcccaggataaagtggcggtggtgtttggctgctggacgtcggtctcgcgtaaatcggtcctgccggtgtttgaggaactgaacggcctgctgttctacccggtgcagtacgaaggggaagagatgtcccccaacgtcttctataccggcgcggcgcctaaccagcaggctatcccggcagtggaatacctgctgagcgaggacggcggcggcgctaaacgtttctttctgctggggacggactacgtctatccgcgcaccaccaacaagatcctccgcgcctttctgcatgccaaagggatccaggacaaagatatcgaggaggtctacaccccgttcggctacagcgattaccagaccatcgtcgccaatatcaaaaaattcgccgccggtggcaaaacggcagtggtctccaccatcaatggcgattccaacgtaccgttctacaaagagctggctaaccagggtctgaaagcgaccgatgtaccggtggtggcgttctcggtgggggaagaggagctgcgcggcatcgataccaaaccgctggtcggcaacctcgcggcatggaactactttgagtccctcgataatccgaccaacaaagcctttgtcgccgattatcgcgcgtatgccaaagcgcacaagctgccgaatgccgatacggtggtgaccaacgatccgatggaagcgacctgggtgggcctgcatatgtgggcgcaggcggtgaccaaagcgggcaccaccgatgttgacaaagtacgcgaggcgatggccgggcagaccttcaacgcgccgtccggatttaccctgaccatggatgccaccaaccaccatctgcataagccggtgatgatcggtgaaattgaaggcaacggccagttcaacgtggtctggcagaccgatgagcccgttcgcgcgcagccgtggagtccgtggatccccggtaatgataagaaacctgaccatccggtgaaaaccgtcagccagtaagcgccacggccgacggggcgggagcgtcgcgcccgtcggccgctgaccagaggagaacgacatgaacgcattgggtctcatgagtgtgttggcgctattgctgaccttgctgccatggcgggcgcaggccgcggaggcggacgacttcgttgccgccagtcgcagccagcaggcgcagctgttgacccagtgggcggcagcgccgcaggcggatcgtctgccgctgctgcgggcgttgaccaccgagagcctggtgatggacgacggaaaacatgctttccgcacccgacagggcggattacagccattgggcgctgtcgccgcgccgcagggcgaaacccggccggtccgtctgaccaaccggctgcgcaatctggctgccggcgcgctggccagccaccttattttaagtgacaatgtcacggagagagcttccgccgcacgaacgctacagcgggaagcgactccggccatggccgcgctgctgcaacagcggctgcaggcggaaaccgatgataatgtgcggggtctgctggaggtggcgctggcgcgcctgcagctcgctcagcctgaggccagcgcgcggctggccgccgtgacgctgctcggccattccgcggacccggaaacccaggcgctgctgatcccctttaccgatgcccagcatgagccggatgcggcggtgcgcgaggcggccagcgatagcctgcaaaagatcaaacatcgtctgctgctcggcgatctgctgggccaggcctttatggggctgtcgctgggctcggtgctgctgctggccgcgctggggctggcgatcacctatggcctgctgggggtgattaacatggcccatggcgagatgttaatgatcggcgcctacagctgctggctggtacagcaggcgctggcgcagctcgcgccgcaatggctggccttttatccgctggtcgcgctgccggtggcgtttctggtgaccgccgggatcggcatggcgctggagcgcaccattattcgtcatctgtatggtcggccgctggaaacgctgctcgccacctgggggatcagcctgatgcttatccagctggtgaggatgttgtttggcgcgcagaacgtggaggtggcaaacccggcctggctctccggcggcgtgcaggtcctgccgaacctgatcctgccgtggaaccggctggcggtgctggcgttcgtcctgctggtgctgtgctttacctggctcatcctgaaccgcacccgtctggggatgaacgtccgcgccgtgacgcagaaccgggcgatggccgcctgctgcggcgtgcctaccgggcgggtggatatgctggcctttggcctcggctccggtattgccgggctgggcggcgtggcgctgtcgcagcttggcaacgtcgggcctgaactgggtcagggatacatcatcgactcgtttctggtggtggtgctgggcggcgtcggccagctggccggcagcgtggcggcggcctttgggctgggcattttcaacaaaattctcgaaccgcaaatgggcgcggtgctgggcaaaatcctgatcctggtgatgattattctgtttattcagaaacgcccgcagggtctgttcgcgctgaaagggagggttattgactaatgagccaaccaatcaccttaacgctggcgcagcgcgcgccgcggcctctgcgctggctggggatcctgctggtgctggggctgctgtgtatgccattcctggcgctgctgccggcctcccatccgctggcggtgccgagctggctgctgacgctgagcggcaaaatcctctgctacgccattgtggcggtggcgctggatctggtctggggctatgcgggcatgctgtcgctggggcacgggatcttctttgccctcggcgggtacgccatggggatgtacctgatgcgccaggcggcgggcgacggtctgccggcgtttatgtcttttctctcctggagcgagctgccctggttctggtggggcacgcagcatttcgcctgggcgatggcgctggtggtgctggttcccggtctgctggccctggttttcggctggtttgcctttcgctcgaagatcaaaggggtctatttctcgatcatgacccaggccctgacctatgccggtatgctgctgttctttcgcaacgagaccgggtttggcgggaataacggcttcaccggttttaccacgctgctgggctttcctgtcaccgccgccggcacccgcgccagcctgtttatggccacggttttgctgctgttgctgaccctgtggctgggctcggcgctggcgcagagtaagtttggccggatcctcaccgcggtgcgtgacgccgaaaaccggctgatgttctgcgggtacgacccgcgcggcttcaagctgctggtgtggacgctgtcggcggtgctctgcggtctggcgggggcgttatatgtcccgcaggtggggatcatcaaccccagcgaaatgtcgccgaccaactccatcgaggccgccatctgggtggcgctcggcgggcgcggcaccctgattggcccggtgcttggcgccggattggtcaacggtgcgaaaagcattttcaccgtggcgatgccagagtactggcagctgtttctcggcctcatcttcatcattgtgaccctgtttttaccccgcggggtgatgggcctgctgcgtcgaggagaccgctaatgcaaccggatgaaggactgtttacccgccagctgcccggcgatcgctttcgcgaacaaaccgatccggtgctgcagctggagaacatcaacgtcagctttgacggtttccgggcgctgacggatctgtcgctggcgataggcgtcggcgaactgcgctgtgtgatcggccccaacggggcgggcaagaccaccctgatggacgtgatcaccggcaagacccggccgcagagcggcaaagcgctctatgaccagtcggtggatctgaccactcttgacccggtggccatcgcccgccagggcatcgggcgcaagtttcagaagccgacggtcttcgaagcgctgacggtggcggaaaatctcgccctggcgatgaagggggataaatcggtgtgggccagcctgcgcgcccggatgagcagcgaacaggacgatcggctgaatgaggtgctgcgcctgctgcgtcttgacggcgagcgctaccgccaggccggtctgctgtcccatggtcagaaacagtttcttgagatcggcatgctgctggtgcaggagccgcatctgctgctgcttgatgagccggcggccggcatgaccgatgcggaaacggagtatacggcggagctgtttcgcacgctggccggacagcactccctgatggtggtggagcacgacatgggatttgtcgagaccatcgccgaccgggtgacggtcctgcatcagggccaggtgctggcggagggatcgctgcgggaggtacaggccaatgagcaggtcattgaagtttatctgggacgttaaggagcgccaatgttacaggtgagtcagctacatcaatactacggcggcagccatattttacgcggggtggatttttccgcccgccagggcgaagtcacctgcctgctggggcgcaatggcgtcggtaagaccacgctgctgaaatgcctgatggggctgatcccggcgcgcagcggtgaggtacgctggcaggatcagaacatcacccatcgcaaaccgcaccagcgggtgcaggccggggtcgcctacgtcccccaggggcgcgagatatttccgcgcctgacggtggaagaaaacctgctgatggggctgtcgcgctttcccgcccgcgaagcgcagcaggtgccggaggagatctaccagcttttcccggtgctcaggaccatgaagcagcggcgaggcggtgacttatccggcggccagcagcagcagctggcgattggccgcgcgctggccagccgcccacagctgctgatccttgatgaacccaccgaggggatccagccctcggtcatcaaagagattggcgaggtgatccgccagctggcgagccgcggagacatggcgatcctgctggtggagcagttctatgactttgccgccgggctggcggaccactacctggtgatgtcgcgcggcgccatcgtccagcaaggcaagggtggtgatatggagagcgacggcgtgcgcgccatggtgaccatctgaccaggccggcggcggtcgcgccgccggtttgcggcctatttgcgcagcagccgctgcaggcgcgcctggcgccagtttttaatccattcgccgaacacgaacaggcgtaatcctctcaccaccagcagggcgccccagatcagggcgacccagccggaccagtagtactgtggattagtgaagcggttaagcaccgccagcagcacgcaaaccaccagcgccaccgacagcgaacggaaaaagcggctctcctgatgcacccgcgctttggcttcctctatgcgcaaatccagtgaggcttcctggcccggcgcgtcttcccgccgggcttcgccgccgatctcggccaccgtcacctcaaagaccgcggcgagggcgctgagggtctccagccccgggcgttcgccattctcaatgcgctggatcgtacggacgctgagacccgccatttcggccagctgctcctgggaccaggcgcgctgcagccgtaattgtttgacctgattgttgctgttcatattcgtatgctccataacgttctgcggatgtaaacctgtgatggagtatggtgaaccgggccgccagccaccacgacagcgacccgacaacggcccgacagcaacctgacagccgcatgccagctggcgtcaggcgttggccagcggagaatccggttgccagggacgggcattgatcccgcggaaaatcatcagccaggcggcgacaatcgccacgataagaatgacaaaaagcgaccagtgcggcagatgggtgaggatcaaccccgtcagcatcgggttgaatgccgcccccagccaccccagcgactgggcggagaagtagctggccttcatccccggcggggcaatatggtcaatcagcatatactccccgggggcataaatcacttccccgagggtgaagatcgccgccgagatcccccacgcccacaggctggcgccagagaacataaagcccacaaggccgatcacaaagcagacggtgccgaaggtcattagcgggcggatatttctcgcgctcagccgccggccaaccgcgtactgcagagcaaccaccaccgcggcgttgaccggcagcaccacggccaccactttctcggcgaaatcgctgctggcgaccaccagcacatactgcgagagacaggaggcgaaggcgccgccgacgaaggaggccagcagcccggagcaggtaaaccacagcagcgcccggtcgcgcagcaacaccgaaggcgaccagggcgctgcgcccggctgggccgcggcggcgccatcccgctgaagaaacagctgaataaacaccagcggaaaggcggcgcaggcggccgccagccagaacggcaaattgatactgtgcattaccagcagggtgccgatgggcggcccaacggtccagccgatgttgaggatggtgtagttcagcgagaagatgcgcgcttttttctctgccgtcagccgatcggcgaaccaagctttcaggacggtggaaaagaccgagtaggcgcagttgatcagcgcaaagaagatcaccaccaggagggcgttattgaccagcggtattgcgctgaagccgagaataaataccagcactgaccacaccatatagcgctttttatcgaacctgtcagcgaggatgccaaaacccatgctgaacaacaccccaaccaccagcgccagcgacagggcatagccaatcacatccacctccagctgaaagcgtcgggtgagatagatggtcataaacggcagtgtggccccgcggccgatagtcaacagtaacgacgatgccagcagcgcgatggtggagcgccggagagtggtgatcatgatttccttgcctgtcatgttgttataattttatgtcttcgatcacaaataacacggccattacgccttgtacaggtcatcgcggtcgacgggcgcacttccgggcctgccaaaaataatgatctatcccggcggccgctttttcgctactttgattttgttcacaaaaattccaataacgacagaggcaggggtatgacgaggaaagatggactactggcgctgctggtagtggtggtgtgggggcttaactttgtggtgattaagctggggttgcacaatatgccgccgctgatgctggcggggctgcgctttatgctggtcgccttcccggcgctgctgtttgtcgcccggccagctattccgctgcgcctgctgctgggctatggcctgaccataagtttcggtcagttcgcctttctgttctgcgctatcggcctgggtatgccggccgggctggcctcccttgtgctgcaggcgcaagccttcttcaccatcatccttggcgccttcgtctttggcgaacgtctgcagggcaagcagctggcggggatcgccctggcgatctttggcgtgctggtgctggtggagggcagccttggcggggagcatgtgccgctggtgggctttatgctgaccctcgcggcggcgctcagctgggcctgcggcaatattttcaacaagaaaatcatgtcccaggcgagccggccgccaatcatgtcgctggtggtctggagcgcgctgatcccggtgctgccgtttatgctggcctcattgttgatcgatggtccgcagaccatgctggcgagtctgcaacacatcgatctgctaacgatactgtcgctgctttatctggcgtttatcgccactatcgtcggctatggcatctggggatcgctgctggggcggtatgaaacctggcgggtggcgccgctgtcgctgctggtgccggtggtgggaatggccagcgctgcgctgctgctcggggagacgctgagcggactgcagctcaccggggcggtgctgattatggccgggctctacattaatgtctttggcttacgtttggtgcggcctggcatggcgcgcggataaaaaaaagccccggagacggggctatacacaattatgcgtgtaatggcatcacaggtcgtgctgctggtagtacggcacgccaagttcgtcagatttatcattaccagccgccatatgattgaaatcaaacggcgaatcattatgttctgaagggataatcattgtatcacgctggttttgacgcaccggcgtggtgttttgctccgcatagctgaggctggaggccagcgacaagagtacgatagctgcggcagcgaatagtttcatgatttcctcaatacgtcttttatagtgcaggcgattaacatcagttatttagcggatgtagatagcgggattcgccaggtacattcgttatgcgatacttgtggggcggaacatcgaaatagttcttgaacgttcgcgtcagggtctgctgcgactcgaaaccatagcgttccgccaggtacaggattggctcattgctctgcttgagcttctgcgcaatctccgtcagcttgcggctgcggatgtactggccgagggaatggccggtctctttcttaaacatacgttgcaggtgccacttagagtaaccggagcgctcagacactttttccagcgacaggggcgattccaggttatcctcgatccacgacaaaatactatggatagtgatggcgtcattattacgtctggacatcatcttacctcttcttatttttacggcaggaccttcttgagcagttgctcaagcatggcgacttcgtccgccgacagatttttcgttaactcctggtgtaacttctgacccacaacctgatgacactgctcgcaaagggctgcgccgtccggcgtcaactgcaccagcacgccgcgcttgtcagcggggttgggtaaccgttcaatccagcctttgcacgccaggcggtcgagcatgcgcgtcatcgcgcccggatcgacggaaagcacggttttcagctcaacgggggtaatacatacttcgcaacgaatggagcagagcacgcgaaactgggtcgcggtaatatccataggtgagaggtagtcattgagcaggcgatcttttttctggttaaccatctggatcaagcggcccagcgggatcatttcattaaacaggtcgctggtacttttcataatggttgcccaggcaagtaattagttgcaggtgatactattgcccaggcaatcataagtcaacattatgaattggccgatgccacgatttgctaaaatggaaaagtacgatgtgggtcactctttatgatttttctaacgcttgttatttttttgcagaagtgatttatcagcaggctggcgtcaaatttgttgaagccgatatactcacggaatgaaaccattcttaaaaaatgaatattaacgggactttaattaactatgttcgatttgtttaaagcaatagggctcggcctggcggtgcttttaccgctggcgaatccactcacaaccgtggcgctgttccttggcctggccggtaatatgaacaacgccgagcgtaataaacaggcgttaatggcatcggtgtatgtcttcgccatcctgatggtgtcgtggtatgccggtcaggtggtgatgaatacattcggcatatcaatacctgggctgcgtatcgccggcggattgattgtggcctttatcggtttccgcatgctgtttccccagcaaaaagcccacgattcgatggaagcgaagatcaaatcggaagaactgcaggatgaaccgaccgccaatatcgcctttgtgccgctggcgatgccaagcaccgccggtccgggcaccatcgcgatgattattagctccgcctcgaccgttaagcacggcgtggacttccctgagtgggtggtgctggcggcgccgccgatcatctttttgctgttaggggtgattctgtgggcttgtctgcgcagttccggcgcgattatgcgtctggttggcaaaggcggcatcgaggccatctcgcgactgatgggctttctgctggtctgcatgggcgtgcagtttattattaatggcgtgctggagatcatttcgacctggcatccctgaccgcccgcgatgcgcagagaaaaaaagcccgccggcgcgataccggcgggcttttttgtgcgacggattcaggagtggtgcggctgatggtcttccagcgataccggccagcgacggaatatcatcagcgaccagaccagcgcgaccagcgccggaatggcgccgacgtagccgacggaggccatggaaagatgcagactcacctggctgccgaccagcgccccggcgcctatgccgatattaaagatgcccgagaacagagacatggcgacgtcggtggcatccggagcggaggccagcactttcacctgcatgccgagaccgataatcatgatcgccaccccccagaagatgctgagcagcatcaggtgctgcgggttatgcgaggccggcagcagcagcagcaggcaggcgagcagcagggcaatcgccaggcttatcagccccgacgcgtgctggttaccgagtttaccgaacagaatgctgccgataataccggccccgccaaggatcagcagcagtacggtggcaaagttgccgctcaggcccgctaccgtctggacaaagggctcgatatagctgtaggcggtataatgagcggtcaccaccaccacggtcagaatgtacacgctgaccagcgccggacggcggaacagcaccggcaggcttttcagcgagccagaatgttcgctcggcagggtcggcagcagttttacgaggcaggccagggtggctaacgcgccgaggccgatcgccaggaaggtcatccgccagccaaagtactggccgataatgcgcccgatcggaataccaaacaccatcgccagcgcggtaccggtggcgatcaggctcagcgcctgcgcccgtttgcccggcggggccatgcggatggccagtgccgacgttatcgaccagaacactgcatgcgcaaaggcgataccaatgcggctgatcaccagcacgtcaaaattccaggcaaaaaacgacaggacgtggctggcgataaacagaataaacaggccgataagcaggcgccggcgctccactttgctggtcagcagcataaacggcagcgacattaacgccaccacccatgcgtagatggtcagcatcatgcccacctgggcggtttccatgccgaagctgtcggcaatatccgacaacagaccgaccggggcaaactctgtggtgttaaaaataaacgcggcgatggccaacgtcacgacacgtagccacgctaccttgcgtgagaccgtattcgtagtcataagctctggactggtgattcagggaaagatgtgacgctgatcttaaaacgattgttggcgaaaagacaatcattttgtgatctgcgtctcatttcatcgcaaggggctggccgcggttaagcgattaattttgctatggatagtgtcaagggggcgcttttatgtcatgttgaaggaaagtaaaaaaagtaaggacagggtatgcaggaaattcaattttatctggtcgatgctttcagcgataaaaactttggcggcaatgccgcggccgtctgcccgctcagcgagtggttagccgacgatgtgctcctgaaaatggcccagcagcataatcaatccgaaacggctttctttgtccgtaccgacgagggctatgagctgcgctggtttaccacactcgctgagatcaatctctgcggccacgcgaccctcgccgctgcgcacgttattttcgaatatctcgaccatccttcggcgacgattctctttagcacccgttttgttggtgagctgcgggtcacccgtaatggcgactggctgacgctcgattttccggcgtggtcgacctccccggtggaaaacccgccggcggatctgctgaccgggttgggactcgaggccgccgttgaagttcgggaagggcgcgattatctggtggtgctggcggatcgccagcaggttgaagcggtgcgaccggatatggcgcggctgcgaacgcttggcaaaatgatctgcgtcagcgcgccggatgaagagtatgactttgtcagccgcttcttctgcccgggagaaggggtgccggaagatccggtcaccggctccgcccatagcatgctgatcccctggtggggcgaaaagctggggaaaaccaccatgatggcgcgccaggtctccgctcgcggcggcgacctgcgctgccagtggcagggcgaccgtgtgctgattagcggccaggccaccacctatatgcgcggaacggtttacctgcgttaatcatcgcccccgcgtcgccccggggagcggtaatctacttccgctccccgggtgcgacatagcatcagcccagcgatgcgccgccacacatcaccagctcctgtccggtcatcgccgatgcgccctcgctcagcaaccagctcaccagagagaccacttcctgcggagtaatcagtcgcccaagcggcggaagccgcggcggggaactttctctgcctggctgatgaagcatcggcgtatcggttgcgccgggggccacgacgttgaccgatatcgtgaccgacgcccacctgccggatataacccgcgaggcgctggagaccctttccccgcagctgatcattgccgactgactcgcaggctgccgtcagggcagacgggcgatattggccttgatcaccgcgatcgactggctgaacttcgcctgctcttcgccggccagctgcagttcaatgatctgcttcacgccaccctgggccagcaccgccggcaccccagccgccgcgccgctgaccccgtactcgccgtcaagaatgcaggagaccgccagcgcgcggtggctgccggtgaagatattgcggcatatctcggcgatggtccctgccacgccatattcggtgcagcctttacccgcgtagatctcaaatcccagcttgcgcactttgtcagccatcgcctcgcgatcgagcggcaggccggtgcgctgctggtagaggtcggcgattggcgtgccatataccgaggagtgcgaccacaccggaaactgggtatcgccatgctcgccgaggataaaggcgtcgatgctctgggcgccaatctccagttcctgcgccagcaggcgacgcagacgggtggtatccagccagacgccggtgcccagcacctggctgcgcggcaggccggaaagctgccatacctgccaggtgatgatgtcgcaggggttggtggccaccagaaagatgccgttaaatccgttggccatcatcgtcggcacaatgctcttcacaatcttcgcggtggaggtcagttcatccagccggctctggccggggcgcagcgcgccgccggagacggtgatcaccgcgatatcgacatcggcgcagtcgctggcctcgcgggtggagatggtcatcatccccggcaggtaggccgcggcgtcgctcaggtcctgagcgtgggcctcagcgctctgttggttaaggtcgacgaggatcagctcctcgcaaatgctctggttgagcagggcgtaggccgccgacgcgccgacattgccggcgccaataatcatcactttacgggctttggtgtgcatattcagatctcaagtacgaacggcaggggataaaattactgtgtttcagtgggttagcgcaataggcgggcggcaatataagttaatgctatgtcgggaaaagccgccggccgcgctacagtggggtaaaaaaggagctcacctatgtacaccatcaccgacatcgcccctactgacgccgaatttatcgccctgattgccgccctcgacgcctggcaggagaccctctacccggcggagagcaaccacctgctggaccttagccagctgccgtcgcagacggtcatcgccctggcgatccgcagcccgcagggcgaggccgttggctgcggggctattgtcctcagtgaggaaggctttggcgagatgaagcgagtctatatcgatccccagcaccgcggccagcagttgggagaaaagctgctggcggcgctggaagcgaaagcgcgtcagcgcgactgccataccctgcgcctggagaccggtatccatcagcatgcggccatcgccctctacacgcgcaacggctaccagacccgctgcgcgtttgcgccgtatcaacccgatccgctcagcgtgtttatggagaaaccactgtttgccgatcttcgttcagcagcgctataaacgcctccagctggcgggttttggcgccccggcgccacaccagccaggtggtgagccagcgccactcttcggccagcggccaggcggaaacctgctgatggccgggcatactctccagcatgctgcgcgggatcaacgccaggccggcgccggcgatgacgcaggccagcatcccgtggtaagactccatctcgtggatcctgcccggggtcgctctgtcggcatgaaaccagctctcaaaatgccggcgataggaacagttggcgcgaaaggcgtagacgttggccccgttcacttcgctggcgcgggtgatgggtgcgtggccgtagggggcgacgatcatcatctcttcagggaacaccggcagcccctccaggcccggatgcaccagcgggccgtcgacaaacgcggcgctcagggcgccttccagtacgccgtcgatcatcgtcccggaagggccggttgagagcgccagatgaattttcgggtagcgctgattaaagtgggccagagtgctggggatccgtaccgccgcggtgctctccagcgaaccaagtgaaaacagcccctggggttcgtcgcccgccaccaccattcgcgcctcgtccaccagggcgaggatctgctggctatagcgcaaaaagctgtgtcccgcaggcgacaggcgcaggcgctggttctcgcggataaacagctcaacgccgaggtcggcctccagctggcggatgcgggtggtgaggttggacggcacgcgatgcactttctgcgccgcctgggtaatgctgccggtgctggcgacagcgttaaacatctctagctgagtcaggtccatgatattcttcttttgtgaatgtgttgcttaatattattcattttcaatgaatggaaaggtaagccagaatacggacacttcgcaagcaacgagagagaataatgatgaatttatctgcaacgcacgccgtctccgtcaatccgactaccggtgaggtggtctcctcgctgccgtgggccagcgaacgcgaggtcgacgcggccatcgcgctcgccgcggcgggctatcgccagtggcgtcagacgccgcttgccgaccgcgccgacgccctgcgccgcatcggggccgcgctgcgcgcccgcggtgaagaggtggcccagatgatcacccttgagatgggcaagccgatcgctcaggcgcgcggcgaggtggcgaaatcggccaacctctgcgactggtacgctgaacacggcccggcgatgctggcgacggaagctaccctggtggaaaataaccaggcggtaattgagtatcgtccactgggcgccatactggcggtcatgccgtggaacttcccggtctggcaggtgatgcgcggcgcggtgccgatcctgctggccggcaacagctatctgctgaagcatgccccgaacgtgatgggcagcgcccgtctgctgggcgaaatttttgccgccgccggcctgccggatggtgtatttggttgggtgaacgccaccaatgacggcgtttcgcagattatcaatgacgaccgcatcgcggcggtgaccgtcaccggcagcgtccgcgccgggaaggcgattggcgcccaggcgggcgcggcgctgaagaaatgcgtgcttgagctgggaggatccgatccctttatcgtgctcaacgatgccgatctcgatgacgcggtgaaagccgccgtcaccggccgctatcagaacagcggccaggtgtgtgcggcgtcgaaacgctttattctcgaagccggcattgccgaggccttcacccgcaaatttgtcgacgccgtggcagcgctgaagatgggcgacccgcgcgacgagcaaaactacgtcggaccgatggcgcggttcgatttacgcgatgaactgcaccagcaggtaacggcgacccttgatgaaggagcgactctgctgctgggcgcggaaaaaatcgaaggggcgggcaactactatgcgccaacggtgctgggcaacgtcaccgccgggatgaccggctttcgtcaggagctgtttggtccggtagcaaccctgaccaccgctcgcgacgctgaccatgcactggccctcgccaacgacagcgagtttggcctgtccgccacggtctataccaccgacgaggcgcaggcccagcgctttgcccgcgagctggagtgcggcggcgtcttcctcaatggctactgcgccagcgacgcccgcgtggccttcggcggcgtgaagaagagcggttttggccgcgagctgtcgcattttggcctgcacgagttctgtaatgcgcagaccgtctggaaagaccgtcgctaatcaacgttagcccctgacgaccgtcgtccacgtctgctatactcgcccaccgaattttgatggtgggcaaggagccgcgtgtggcgacggtaatcaataatgcaatgctggaagccattctggcagaaatcaggccgctgattggccgcggaaaagtggcggattatattccggcgctggccagcgtcagcggcgacaagcttggtatcgcgatcagtacggtggacggtcagcactttgccgctggcgatgcccatgaacgtttttccatccagtcaatctccaaggtattgagcctggtggtggccatgaaccactatcaggaggaggagatctggcagcgggtggggaaagatccttccggccagccctttaactcgcttctgcagctggagatcgagcagggcaaaccgcgcaacccgtttatcaacgccggggcactggtggtctgcgacatgctgcagagccggctcagcgccccgcgtcagcggatgctggagattgtccgccgtctgagcggcgtggccgatatcgcctacgatccggtggtggctcgctcagagtttgagcattcggcgcgcaacgccgccatcgcctggctgatgaaatcctttggtaacttccataacgacgtcgccaccgtgctgcagaactatttccactactgttcgctggagatgagctgcgttgagctggcgcgaacctttctgtttctcgccgaccgcggcattgccccgcatctcgacgcgccggttattgcgcccatccagtcccgccaggtgaatgccctgatgatgaccagcggcatgtaccagaacgccggtgaattcgcctggcgcgttggcctgccggcgaaatcgggcgtcggcggcgggatcgtggcgattgtcccgcaggagatggcgatcgccgtgtggagcccggagcttgacgacgccgggaactcgctggccggcgtggcgatgctggaaaaactgactcagcggatggggaggtcggtgttctgatggtcgatcaggatcgcttgtttgcgcgcctggcgcgctcgacgtttcgctcacgcttccgtctggggggaaagagcggcaatattgtctcgataagggaccggaggtcattgatcggcatgccgcagactttattcgccagcggctggcgcccgctgcgccgatcaatgatggcaagcagacgccgatgcgcggtcacccggtgtttatcgcccagcacgcgaccgctacctgctgtcgcggctgcctggaaaaatggcatgccattccccacggccgcgcgctgagcgagccggagcaggactatatcgtgcaggtcatccaccgctggctggtgctacaaatgaatgcgccgtctgtgcgctaatttgcatttgatcggcgccggagtatgcctgataaatattctcatgttatgataatccgctaactaactattaacataataatttcctgaaacaattagacggataattactgaatgtcttcactgtcgattcggtcatttacgctgtttcgtgaagaacaacccgtgcgcgatgcattggtcttatttacgttaacgctactgctgcattttcttggcgctatgctgcgtctggtgcaggagctctctttcttctggccgctcaatgcagtgatggccgggatttttgcacgctatgtatggcttaaccgcagctatttttatgccgtctgttttgcggcaatgctggtctatgatggattaacctcgcgctggggtatgggctttgcctcattgctgattaacttttccaatattgtctttattgtgacgctagcgcagctggtgctgtgggataaacgtcgcgccgactccatgccgggcccgataaacgcgcttaatttattctgtttctgcctgttagccgccttactgtgcgcagcggtcggcgcgctggggtcggtggatgttgaacgcgccaccttcgttccccagctggcggactggtttagcgaacagttctcaacggcggtattaatcctgccctttattctgaccctgacgctgccttcggcattaagcggttttcgctttcgccagctgctgccggtgctggcgctggtcctgtcaattgcgcttggcgtggcggtaggcggcgcgggcagcattaccttcccgttaccggctttgatctggtgcgctgtacgctatccgctgccgctgacctgtctgctgacttttctcactggcatcggcgaaatactgctggtcgctaattcgttaattcacttttcgccagatgcgcgaatgcagccgtggcagctgttctccacccgcctcggaattgccgccatgctgattagcccggtgattgtcgcatccagtgtcgaagcgattaacacgctggtgaagcagctggccctgcgcgccgattttgactttcagacccgcgtctattcccgttccggactgagcgaagcgttgaagcgtcagacgctgccggcggataagctgctgacggtgatggtgctggatatcgatggcttcaaacgggtgaatgatgctctgggccatgaaggcggcgattgcgtgctgacccagtttgcccagcaggttcgacagctggtgggtgagcaggggatggtggcccgtatcggcggcgaagagtttgcggtggccgccgtcgtcgacagcgcccagcagggctatttgctggcggaaaagatccgtcacggggtggagtcgcagcctttcggcctgggccagaacccgatccacctgaccatcagtctgggactggagacgcgcgaggtaggccacgcccgcatcaccgagctgtttaaccagctgctgttggcggcggacgatgagatggtgaaagccaaacagagcggtcgtaaccaaatttgtatgccgacgctgaccgaaagcgcgccataagaaaatcctatcgggatcctacttgtgctaatttttggttaaaaacatagtgatgtggtcgataacagggagcttttatgaccacatccttttcactgcgcacgctctcgcgtgacgatattctccatcacctcccggcattaagcgagatcctggcaagctgcgtcaacggcggcgcctcggtgagctttatgctgcctttcgcgccgcaaacggcgataacgttctggcaacgcactgccgacagcgtggcggccggggagcgcattgtgctggccgccttcgacgcggaggaacgtcccgttggcaccgtgcaacttatcaccagtcaaccggaaaaccagccccatcgagcggatgtcgccaaattattggttcaccaaaatgtccgccgcaaggggatcgcccaggcgttgatgagcgagctggagcgcattgcccggcgggaaaggaagacggtgctggtgctggacacggcgaccggcagcggggcggaacagttctatgcccgctgcggctgggaaaaagtgggggaaattccgcgctatgcgctgatgcccgacggcgaaatgactgccacctcactattctataagtttctgccctgacggccgctattgcagattgctttgatcaaaacagggtttcactggtagaaaaacctgataacttattggaccaattactcaggttgtatgactactattagagggaacccattgtgaaaactttaaaccgtcgtgatttccccggcgcgcagtaccctgaccgtatcatccagtttggggaaggtaacttcctgcgcgcattcgttgactggcagatcgacctgctcaacgagcataccgacctgaatgcgggcatcgtggtcgtgcggcctatcgccacagattttccgccttcgctgaacacccaggatggcctgtacacgactattattcgcggcctgaacgagcagggcgaagcggtcagcgacgcgcgtcttatccgctcggtcaaccgggagatcagcgcttacgcagacttcgacgcttttttacgcctggcgcataacccggagatgcggtttgtcttctccaacaccaccgaggcgggcatcagctaccatgccggggatcggtttgacgacgcgccgccggtcagttatccggcgaaactgacccgtctgttgtttgagcgttaccagcatttcgccggtgcggccgacaagggatgggtgattattccctgcgagctgatcgattataacggcgaggcgctgcaggcgctggtgctgcgctatgctagcgaatgggaactgccgcaggcatttatcacctggctgacctcagcgaataccttctgttcgacgctggtggatcgcattgtgaccggctatccgcgtgatgaagtggcggctctcgaggcgcagaccggctataaagatgctttccttgataccgctgagcatttctacctgttcgttatccagggacctgcctcgctggaggccgagctgcgtctcgataaactgccgctgaatgtgcgcattgtggacgatatcaagccgtataaagaacgcaaagtggcgatccttaacggggcgcacaccgcgctggtgccagtggccttccaggccgggatcgacaccgtgggtgaggcgatgaacgatgcggagatttgcgcgtttgtcgaaaaagcgatttatgacgaaattattccggtgctggatctgccgcgcgatgagctggtgtcattcgccagcgccgtgacagggcgcttccgtaatccctatattaaacatcagctgctctcgattgcgctcaacggcatgaccaagtaccgcacccgtattctgccgcagctgctggcggggcagaaagcgcatggcgcgctgccgccgcgtctgacctttgccctggcggcgctgatcgccttttaccggggagagcgggatggtgagagctatccagtacaggatgacgccgactggatatcgcgctatcaaacgctgtgggcccgccatcgcgatggccagatgagcactcgcgagctggtcaccgccgtgctcagcgtggcggatcactggcagcaggatctgagccagatcccgggattggtggagctggtgactgccgaccttgacgctatcctgacctgcggtatgcgcgacgccgtcaaacctctttgctgatagtccatctatacacccggctgcggccgggttgtgcaggatttttattagttacaacatactattatactaacctgtaacagccggtcagtggctcctctgcatacggctttttagtgccaaatcgttccgaacagcaggagaattatggccgaagcgcttgaacaaatatctgcgcaggaaaataatgacctcaactcatatctcctgccaatattcgcaggctaatgcattcatctgtaaggaaactctcatggtcatcgatatccgggaagtacggccccacgacaaagccgaatggcttcagctttggcaaggctacactcgtttttacggtagcccgcagccggaagaggtgaccgaatgcacctggcagcggatgctggatgtaaactcgtctgtattgggtagagtcgcggtggtggatgatgcagtggtcggcttcgctatctgtgttcttcatgagggaacctgggttaccacgccgatctgctatctggaggatctgtttgtcgatcccgccttccgtggacagggtattgccagaaccatgattaagtcgctgcaaagcgaaggggcggacaaaggctggtcgcggctgtactggcatacgcgccgtgataatcccgcccgtcatctgtatgatgagtttaccccggctgacgattacgtacgctacaggatcacgcttgagtcctgaagcggtaagaggttgttaagcttttcccgctataacaggggaaacaggctcaggagaagcaacgatggaaaaacgtcttgaaacagtggtcaatgtgattatgtttctttcgctattggcaacggcctgggatctctcgctggtgcatcatctcgcgtggtagtaaattatatcatctgaaacgcggcgcctcttgcggcgccgcctgtctcattcatccgccatcttccctgcgctaaaactccagtcctccagttggttaaactggataaccaccatcacgtcctgcgggctgaccgccatctcatcgtctaaccgcgcgcagagccgacgatagagtccctgtttctgcgcccggctgcgcggttttccagcgaaaatatgaaacaatacgaagtaatagctaaccgagatattttaaaccgggcagggggcgagggaatataaacaaaagagtagagtcaatattactatcaaggccatcgttttataagtatattgaaaggccagatgatcataagaaatatgtgccggaacaatgaatgatctaatctgtcatcacaggcgttccttatttaaatccgatgattatttctgatgatgaacttgctgaattacttattaaattaatgaggtgaatggatggatttcttgaaaagatggttaaaagaagaattcattctttttttatggggatggggtattgtattattaatcattatatttagcatgattgcagtctttctttttcctgacattgccattaacttaataggactttttgttttattaatcattgggtttcacgttgtcgtttggtttaaagttaaaaactgatatgaaagaggaggggtaatgtcaaatccagcatatttatggttaactgatgagaatgattcgcctattataggttcttgcctgatgcccacacgcacgggttccatcgaattgcgcgcagtgaatcatcatgtttggttacctaccgataataatacaggaaagctgacgggaacccgtcttcatacaccggttaaaattcaaaaagagtttgacagaacaacacctttgttatttagggctctttgtgaaggtcgaacattaagatcggcaacgctaaaaatgtacagaataaatgaggcgggactggaggttgaatattttaacatagcgatggcgaatattaagattacgacaatcacaccaaatttacatccggccggaatgacaagtactcaccttgaagacattgatttccgttatgagacgatcacctggatatacacagaagggaacatcatgtatcgtgattcatggaacgatcgctgttgtgcatggtagcaaatgatatagtgctgaaacgcggcgcctcttgcggcgccgcctgtctcattcatccgccatcttccctgcgctaaaactccagtcctccagttggttaaactggataaccaccatcacgtcctgcgggctgaccgccatctcgtcgtctaaccgcgcgcagagccgacgatagagtccctctttctgcgcccggctgcgcggttttccggcgaaaatatgaaacagcacgaagcgggcgctgcgtccttcgctgaggtagtgcgggtcgtaaatgcgctgctcatcggcggcccgttcgataaactgaaatctatctgctgacggaacgtcgaactccgccaccagacactcatgaaagagcgccgacaattgagcaaactccgcgggacgccaggcggtgccaagcgaaattcgggtcaggggcatgacgcctcctgcgcgttcaggcaggtcagggcgctggccgccgccggccaaccggcatagaacgccagatgggtaaacaattcgacaatttcttcccggctcaggccattctgatagccgagcgcgatgtgccacggcagctgttcagttttgccctgcgccgtcagggcggaaagggtgatcaggctgcgttcgcggggcgacagctcgctccgcgcccagatatcgccaaacagcaccgtttcggtcagctcggctagctttggcgcgatagcagccagcgttcggcgatcgacaggaggagtactcatagtgattctctttgcaggttaaaggagtcatcactgtcacacgctgactaagatattgaatatcgcaacgttcaggattatcaatcctgaaaatcaggatggtatagccgatcctttacacctttcatcactccgcttttctgcccacctataccaacggtcaggcggcgatctttcgcgccacgataaacagccgtgggaaacgcaggagcaccttcccgttacactgtaacggatagtgtgcggccagcaatgcgaaatagcgtgtgagaaacgcgcttccggcctgctcgtccaggcctgccagataggggcgtaacccggtgccctgcagccagtcgacaatcgcctgatgagaagcaaggggatgaaaataggtggtgcgccagatatcaacttcgcaaccctggcggctgagcagatcgtaccaggcggcgggcgggagtaacggctggcgtccacggtccggcaaccccatctcgctggcaacctgacgcatcagggtatgggaaggttcctgccagttatccggcatctgcactgccagcgttccgttgtccgccagctggtttaccagatgggggaaaagcgtctcatgatccgtcagccactgcagagaggcgttggcatagatcacatctggcggttgcgcaggccgccagcgggcaatatcggcatcaatgaattcgcagtcgggtaaggcctgcgccgcctggaccagcatggccggggagttatcgataccgacgatagtcgccaacggccaggcggcgcgtagcaggcgggtgctgtttcccggcccgcagccgaggtcgacggcgtgctcgacctgcagatgggcaatacgcgagagcaggtcggccgcggggcgggtacgttcagcgtcaaattgcagatacaacgaaggattccagtcggccatcgggcgcagttcctgtgtgaggagggagacagggtaaagcatagaacgcgtcaggcggcatgtcagcggttaatgaacctcagcggtcacctttgtgcgtgacagtgtcacaaaatagaacgtggctggattgcgcctgcgctgttggccgaacctgggattgagacatggcagggaacgtctctgcgcccgtggcgggcgcaggagcctattcggcgtttttgagcgcctcggcgcggctggcggtggcgtagacaaaatccagcatcggctcgagatcggtgtcatagccagcctgaataatttttcctcgcagccattcgatttcactggtgatatcgggaggaaaaatgttgttatcctgcgcccggcgcagccatttcagcagaaagttattctttcccctgataccacctgcttttttcgattttccgtgcatcttcagcgcgaccaggacgcagtaatagaaatgaacgcgctgattaaaactttggtgcatgtctgtgtttcccgccagaatcaggaattcaccgtgtgggtcagtgattcggattggactacggtaccgggctggatcgttgcgcgaactctgttgtctaccagtaccgtccatgcatctgttgccagacgctgacgggatgttggcacggaagccgaatcgtcgtcaattgccgattcattttttgccggcgtcatcggaccgcggcggcccgcgagccgggccacactactctctggcgacaagccgctgttgccgatgtacgcggaaaatcagcaggaatgcgagcgccaccacgatcgccgccagcagatacagcgtggcgagatcgtagaacccggcgacccagccggccagcggcccggtcaggcccagcgccagatcaagaaacgccgagtaggtgccgagggcggttccctgattttgctcttccacctgttttaccgcctcaactcctaaagccggaaagaccagcgagaaacccgaaccggtgagaaaggcgccgacgccggccatccatgctgatggcgccagccagataagcagcaggccgagactttcgatgatgaagcaggccagggagaccgggactccgccaaagcgggtaatggtatttcccagcaccaggcgaacgcagataaagccgacgctgaacagcgaaagggtaaacgcggcgccctgccagctgtgcgcggcgaagtagagggtgataaaggtggcgataacgccgaaaccgacggtgccaaaggccagccccaggccgtaaggccagatttttcgcaccaccgcgtgaaagggcgctctggcgccggcggtcaccttgacgtcctggcgggtacgagcgaacagcagaccgatggccgcgaccagcactaccaccgtagcaaagccgctgatgccaaaatagtgattgagggtaactcccagcggcgccccgaccgccatcgccacataggtcgccacgccgttccaggagataacccgtgacgtgtggatcgcgccgacggttttgatcccccacagggtggcgccggtggcggtaaagctctcgccgacgccgagaaacacccggcccgccagcagcgcggcaatggccagcatcggcgttgcctgcaggactaccgccagtagcgtgaaggcgccactgagcaggcagcagacgatcccaaggctgaccacttttttcggcccccagatatcggtatagcgcccggcgtgcggccggcttaccagcgtcgatatgtactgcagactgatcacaattccggccacaaaggtgctgtagcccagctgatagtgaatatagcccggcagtacggccagcggcagaccaatggagagatagcagatacaggtaaaaacaacgatcgaaataatgcgcaaattgagttgtgtagtgctgacggaagtgctcatagggataagaggttaatacaacgggatgtgtagcatagcgcgccgtgaggacgctggcgaggcgcgacagcgttttatcggtaaccgacgggaacgatatttgtacgaatgtaaataactgcttttacagcgcttaacgcccgcctcgctcagcgtcagctcgccgccatacccgacgaatcacacaccatgccccaggcgcggttttgcaataccgtgcggtagccgtcccggtcgacgaaagtgacgccattgacctcccagtaagggttaaacgccgtaacgcgcagaaatccggcggcgtccatggctgcgcactgtgcctcccatgccgcctgctgcggatagtacagcaccagcagatcttcatcgcctggcgagggggtgacgggatggtggcggcactgggtgaattccagatgccagcccgcttcgggcgcgccgagcattatcccgctgaatccttcatgatcggtaaagctgccgagcagctcgagtcccagcccggcgcaatacatgctggcggtggtgtccagttcgctgaccggcctggcaatgcgcatatgacagaacgacataatgactcccgtgagcataagttgagttgatactgtaccggtaaatcggcccggcgtgtgttaagccgtgcccaggcgccaccttctctctgtaaataccatagcggattaacatccgccttgcgccaacaatacctctttatcataataaaaaaagaatcattcaatattattattcttaaattgagaatcactgtggggtggtggatgaataaccaatcgcgccaggccttatggctggcactggctggatcgatagtactgatgatcggcatgggctacgggcgctttgccttcaccggcgtgctgccgcttatgcttaatgaaggtctgttaaccctgcacgagggcaatctcgccgcgtcggccaattacgctggctatctggtcggtgcgttgctgctggcgcgggtgcagcctggggccgccacccgactgagcattatctccgccgggttgaccatcgccagcctggcgctgctggcctgggtgagctcgccgtggaccattattacgctgcgcgccgtcgccggcgcgctgagcgcgataacgctgattgcaggttcgctgtggctgctggaacatatggggcatcatcacggggctccgttgctgtatgccggggtggggctggggatatttatctcagcggaggggatcgcccttggacatgccctgagcctcaccagccagcagatctggctgctcagcgcattatgcgccggtctgctgctggcgctggcgatccgttggctgctgactccgccggctgcactggtgcgggtttcccatgttgaaacctccctgcctgcgtccgggagcgatacccgtcgcgcggcgtggcgactcttgatggtttacggtctggcgggcttcggctatatcatcaccgccacttatctgccgttgtttctgtccggttcgctgcagagcgttgacccggtccatctgtgggcgctgtttggtctggcggccgcgccgtcctgcctcatctggcataagctggtgctaaagtggggataccggcaagcgctgacccgcaacctgctcgtccaggcgcttggcgtgatccttccagcctgcagcgcttcattgctgttttgcgtgctaagcgcgcttttggtgggctttacctttatgggcaccgtaaccattgcgctaccgaaggcgaaaagtctcagccatcaggtgagcttcaatatgattgccgcgatgactgcactgtacggtgtgggacagattgccgggccgcttatcgccggcgcgctgtatcagatcgcggcttcatttaacccggcgctctgtgccgcggcgctggcgctgctgattgccgcagggctggtctttaccgaacgccaggcttagccaatcgccacgctttgcagcagcttgcgccactcgctcagggcgggggcgctcaagccgctgcgccagataagctgggtggtcgcctcgcacagcggttcgctaaggcagttttcgggaagcgtcatcagcgacagcacgctctgcggcagcaggcaggcgtagcgcccggacgccacgcaggcaagcatgctgtgataggaattgacctcatgcacctccacggccgcctgctgttccgccagccagcgttctcccagcgcgcggtagctgcagccgctggcaaatgccgcgaaccgcagcggacccggggtctgcggacggaccagcatcagggtttcataaaacaccggggtgaatgccagctcggcgggacaagcaggttgcccatcggcccctggtggcaggcagaccagcgcggcatcaagggcggcggttaacaccccctcggttaactggcgggtcggttgggtgatgagggtgatatccacctgtgggcactgctgttggaagcgggtaagcagcggcggcagccggctggcggcggtcgcctccatcgcgcccagacgcagactgccgcctggggttgtcggatgcagagcctgctttgcctcttccgccaggctcaggatccgccgggcatagctgagaaactgcacgcctgccggggacaacaccatttttttgttgccgcgaacgaagagctcaacggcaagctcctcttccagctgctgaatgcgggtcgtgatattggactgtgcgcggcccagccgttttgctgcctgggtgacgctctgcgtgtctgccacctgaatgaagatctcgagtgtgctgtggttcatatttttcttctcaatacgataataatgttgatcttaccatctttaaaggagatggtaagcctccggcatcgttaatgcatgaggaaaccatgagcaacccgctgctttcgcttcttgatattgattatcccctgattcaggccccgatggcgggcgtctccacccccgcgctggctgccgcggtaagtaatgccggtgcgctgggctcgctggggctgggcgcttcaaccgttgcccaggcggaagcgatgatagtcgccacccgccagctgacggaccgtccgttcaatgtcaatctgttctgccatgcgccgccccggcgcgacgcccggcgggaagccgactgggcaacaacattacgtccccattttgcccgctatggcagtacgccaccggattcgttaagcgagatctaccagacatttatcggtcatgcgccgatgctggagctccttctcgacatctcgccggcggtggtgagctttcattttggccttcctgaaggtgagacgatccaacgtctgcggcggcaggggatcgttaccctggcgacggcaacctcgctccaggaggcgctgctgattgaacagcaggggatcgacgtggtggtcgctcagggctatgaggcgggtgggcaccgggggatctttgctccgcaggcgcctgacgcgcagctgagcaccttcaccctggtgcaacttctgcggcgtcgactaaccatcccggtggtggccgccgggggcatcatggacggagcggggatcgccagcgtgatgcagttgggggcgcagggcgtacagctcggtacggcgtttttactgtgtccggaatcggccgccgacgccggctatcgcgcggcgatccacaacagccttgacgggcgtacggtgctgacctccgcgatatccgggcgtccggcacgctgtctggcgaatgccttctgtgcgctgggggaaggctatccggcgagcgccgtgccggattatccgctggcgtatgatatcggcaaagcactggccgccgccgcgaaagcccagggtgtccatgagtatggcgcccactgggccgggcagggggtggggttgatccgcgagtgtgacgccgccactctggtccgccagctggcggcagagagcggctggaactaatgactgacggctagcggcggtgggccaggctacgcaccagccgatcgccggccatttgcaccccctggaccatcgccaccaggatcagcactgtgccaaacatgacttcattattaaaccgctgatagccgtagcggatggcgaggtcgccgagtccaccgccgccgatcacaccggccatggaggagaaaccaatcagcatcacgatggtcagcgtgatcccggccagcagcgttggcagggcttccggcagcagggatttaaaaatcacgtgccagacgttgccgcccatcgacagaatggcttcaattctcccgtagtccacctcgtcgagcgcgttttccgtcagacgggcaaagaacggaaaggcgccgatggtcaccggcacgatggcggcggtgctgcccagcgtggtgccgacgatcaggcgggtaaaggggatcagggcgatcagcagcacgataaacggcagcgacctgccgatgttgatcaccgcgcctaacagcgcgttcagtttcggcatcggcgccagcccgttggcgcgggaaataaataacagcacgccggtgggcaacccgatcagcacggtaaacagggccgccaggcccaccatataaagcgtatccagcgtgccgtcgagtaataacggccacaaatcttcccagctcatgctactccgcataatggcctcccctgaacgccgtggcgggtaagaaattcctgttcagcctgcgggtcgtgcagcagcgactggcgcagccgcgaccatggggtcaccagcaggtcggcgagtttaccgctttcgacaatctcgccctgttccagcagcgccgcgtggtcacagatggttttcaccacctccagctggtgcgtaatcagcacaatggtcagattgaggcgctggttaatatccgccagcagggccagcaccgaggcggtggtctcgggatccagcgcactggtcgcctcatcgcacagcagcacttccggccgggcggccagcgcccgggcgatgccgacgcgctgtttttgcccaccggaaagctgcgacgggaaggcggcggccttttcgctgagatccaccagcgccagcagttcgcgcacccgggcctcgcgagcggccctcggcactccggcaatctccagcggcaccgcgacgttgtcagcgacggtgcgggcatgcagcagattgaagtgctggaaaatcatcccagtgcgcaggcgataatcccgcagcgccgccttgttcaactgggtaatatcctgtccgttcaccagaatgcggcccgaggtgggccgctccagtaaattgagacagcggatgagcgtacttttgccggcgccactgcgcccgagaatgccgtatattgcccctttcggtatctgcaacgcgatatcgttcagcgccggtcggccggttccggcgtaggttttgctcagcccttcgatggttatcatgactgaggggccaccgggatcaccgagccgttgtaggttttacggataaactccgccacctgcggtgacgtcagatctttcgccagcgccttaatgcgcgggtcattcgccagggctggggtggtcaccagaatattggcgtacgggttatgctcggcgctttccagccccagggcatctttcgctggcaccaggccggcttccagcgcgtagttaccgttaatcaccgccaggtcgacatcgtcgagggagcgcgggatctgcggcgattcaatctccagaatcttcaggtgtttcgggttctcgacaatatccttcggcgtcgccagggtggtggccgggtcggtaaatttagggtccagcttgataagcttctgcgcctgcagcaggaacagcgcccggctcaggttggtggtgttattcggcaccgccacggtggcgttttccggcagtgatgagaaatctttatgcttatgcgagtaaattcccagcggctcaatatgcacggtggccgcgacggcaaaggttttacccagcgctttttcctgatccttcagatagggaacatgctggaagtagttggcatccacatcgccactggccagcagttcattggcgttgaccccgctggtcagctccaccaccttcagatcgaggctgggatcgatttttttgatgtagttgaggatctccgcgtggggaaccgggtccgcggcgacgcgcagcgcggcagcctgggcagacgtccatgccagagaaagagacagtgcgacccctgccagtttaaaagcggcatatttcatggtgtgttcctttttagttatggttaaacgatcaattgctcggcgcgttcgcgaaacacgtcctgatagtagcgttccgccacgtccggatgggaacgcagacggcccttgagataattccagccgacatcgcgcagcagcggattgtgcgggtcgctgtccggccctcgcgcttcacgcgccagctcgggcggcagggtgtaaaccggcaccaccgcgtcaagctgggcgccgaggaagaaggcgatggagaggcgctgctgctgcgccggcggcgacaccacgcgatggacggtagcgcgcaaatacccgttggtcgccagctccagcagttcgccaatattgaccacaaagctgccggccagcggcacggcgtcgatccattctccaggcgcgacctcaacctgcagtcctttctgctcgtcctgcagcaggaagctgaggaaaccggaatctttatgggcgccgacgccctggctgctttgggtctcctgctggccgggatagcggatcagtttgatatgctcgttgggtttctcgccgtagagctgatcgaaagcattctccgggagctgcagggcttcggcaaaggcgcgcagcaggcggatgcccacctgggtcatttgctgttgccagtgaagtaataccggtttaagcgacggcagggcggcaggccacagattcggaccctgcagccgctgccagcgcggggcgtcgtcgctgagggtcagcgccggacgttcggcgccgatatcaaactgttctcgccagtcaggctggccgcgcgtcagctcagaggccgcgcggttatagccgcgaaaatggggggagtggatcatcgccacctgctgtttttgcgcctcatcgagagcaaaaaagcgctgggactggcgctgaacttcatattgaagcgcgtcgtcgacaccgtggttgatcaaatagaagaagccgatgtcgcgggcggcatgacgcaggtcggccaggaaggccgctttatccgcggggtccgcgtagcgggccaggtcgagaatcggcagggtggtcgcgttcattgtgttctccgaaaacggggtaataagttatgggtagattcaggttctgggttcgggcacaacagcagcgcatggtgatttcctctgtccggggctgaacacagcttgcctcaaggccaaataagcaaccaataacgttattttctaatttatgaccgcgcggggttcagtgcttttgcgttaaatagatataggcgcgaagcgcgtaatgaagtctgttgcgcccgtcggtgagagccagtaaggtaggcgcactttttaatgcggaacggacgtatcgtaatgcacagctcgaaagatcccctgcacggcgtgacgctggaagcgctgctcaattccctggtggcgcgctatggttgggcggaaatggcccgccaggtcaacattaactgctttaaaagcgatcccagcattaagtccagcctcaaatttctccgccggacgccgtgggcgcgcaaagaggtggaggctatgtatctcgcctcccttgatgatgacgcgccggtggagaaagcggatccctgggcaaactggcagaaaaaataacccttaccacaggacaccatcatgcagagctggagcagtaaagatttcaccgccgaccgcgcgtggggcgcgctggatattgccaatttttccggcaccaccgtgcgtctacactggaccgaccaaccctatatctggcacatcaatgatggtcaggaggtgtttgccgtgatggatggtcaggtggcgatgcatgtgaaagtcgacggcgaggagcagatcatcatgctaaacgccggcgatatcttctacgccggggtgggatgcgagcatgtcgctcacccgcagggggcggcgcgtattctggtgattgagaaagaagggtcggtctgaccccgcggcgggcggttctttgcccgccgtttcatcgcctgtcagatgcgacataccgcgttgatataaatcacttatcctgctttcgatatatttaattcttgtttgccattcccttcaccccagcactatcttttgccgcaggcgcctgaccaggcacaatcgcgggagagatcatggcaaccttgcagtgggaccacgcagtacagtttgtgaatcagccggaagcggcgattgaaatctttgccgggcagcagctgcgggcggtggccggtgggcgccatccggggtggggaacccgtaatgcgctgagctattttggcctgacgtatatcgaattcctcgccattgccgacccggacgaactgcgcgccgcgacggacaaattcctcctttcgcgcgacgccgcacggctgctgccggagaatgaggcgctgtttcgggtggcgctgcgcagcgacgacatcgacgccacccatgaccagttgcgtcgcacaggggtgacagtgtcaccgattgtcgatggccagcgcaacgatccgcagggcaatatcatccgctggcggatcttcaccatcgatggcgacactgccgggctggtctatccctttgtgctgcagtggggagaagacgacgccacccggctgacgcggctgcgcgcccagaggctggacgcgccgcatccgctgggcgacattacgcttgagcaggcggtgttcgaggtggtcaatccgcaggcggtgcgcgatcgctggcaggcgctgctgggctttccgcccctgggggagcagggactggacgtgggcggccagcaatttatcttccgtgaaggggctgccaaccagctgaccgaactggtgttccgcgtcgccaacccggcgcttaaggggcagcgctttcgtgtcggcaacggcgtgtatcgctttacataaaggctgactctagcgtgccgtggcgcgcagggcccccggcggctggccggtgatgcgtttgaaagcccggctgaaggccgccagcgattgatacccgaggctgaaggcgactttttccagcgcctggccttcatgggtgatgtactgcaccgctagccgcatacgcagctcggtgagatagcgggcgggggtggtgccggtggcggcgagaaaacgttccgcgaacagcgagcgtgaaagacccgcctcccgcgccagatcttccactttccagttgactcccgggcgctgatgcatggcgtagatcgctttcgccagccggggatcgcgcaggacctgtacccagccggtggcgttgccgcacccgcacgctacccagccgcggacaatcagcgcggccaccacgtccgccagccgggcgaggatcccggcatagcctgcctggcgggtgagggattcccgctccatcgccgccagcagcggctggatctccggccaggtattaagcaggctgctgacccgcatcacctcgggcatggccttgaccagcggctgcatgccgccgagctcaaagtccatacaaccgctgaaaataacggcgcgctccgggcagtcaggctggtcgccagcgttgatacaacttaccgtgctgcacaccgtttcgctgggcagctgcgccacattgaccaccgtggcctgcggatccgagagcagggcatgcccgtcgccgttgggaataaacagcgcatcgccgctctcgagggtgaactgttctccgctggccatgcgcagcagcaccggcccgcggctgatgaaatggaactgggctttacccgccacggcgctaaagccgacgccgaacgggcgtgcggtttcgatgcgccggtagttaacgccggagaggcgcataccgcgcaacagttcgctggtcaggtcgatggcaggctggctcatggcaattccggacgaataatcaataactgaagagtatgcatcatatatcgtccgaaagtaagtccctaagatgaccaggatgttaataaacctggagagttgtatatgagttcctgcatagctgctgacgagagcctgtctcccgccaaacctgcctggcgcgccgtctatgccctggccctcggggtgttcggcctgatcgtggccgagtttctgcccgccagcctgttaacgccgatggccagcagcctcggcgtcagtgaagggatggccggacaggcggtcaccgcgacggcgctggtggcgttagttaccggcctgctgatcgccaccgccacccgcaatatcgatcgccgctgggtgctgatgttcttttccgtactgcagatagtctccagcctgatggtcgcttttgccgattcgctggcgtttctcctgctgggccgtctgctgttggggatcgccatcggcggcttctgggcgatgtccaccgccacggcgatgcgtctggtgccggcggcccatgtgccaaaggcgctggcgatcatcttttccgcggtgtctgtcgccacggtggtggccgcgccgctcggcagctacctcggggagctgatcggctggcgcaacgtgtttattctctgtgcgatacccagcctgctggcgctgctctggcagctgtgggtgctgccctccatgcgcccggagagcgtcgggaccttctccacgctgttcagagtgctgcgccgtcccggtatgctgggcggcatgctggcgacgatcctgattttcagcggccatttcgccttctttacctacctgcggccgttccttgagaccgtcgcgcaggccagtgtcgaaggggtttcgctgatattgctcggcttcggtatcgctaactttatcggcacttcggtggcgagctatctgctgagccgtagcctgcgtctcaccctggcgctggtgccgttgatgatgagcgttctggcgctgctgatggtgacgtttggccatctgaccgtgctggccgggctgctggtcgccctgtggggatttgccttcggcctggtgccggtggcctggtccacctggcttgctaccaccgtgccggatgaagcagaaagcgcgggcggtctgctggtcgcctctattcagctggccatcagcgccggggccgccggcggcggggcggtgtttgatttgcacggcgccagcggcgtcttcaccggcagcggtctgctgctgttgggcgcgatggtgattgttttcgccgccgtacgggtgaaaccggtcgcccgcgccgaccagccggtgacgggccgcttatcccgcgagatcgataactaaattggccgacaggccgcgggagcagcacagcgcaatatgctgctctgcggcctgtttttccgcctccgactgcacggtatcccggtggtcgacggttccctcgcgtaccggcgtcaggcaggcgccgcagatccccatctcgcaggagagcggcaccgcgacgccatgttcctgcagcacctgggcgatggttttgtcccccggcaccggccagcgctccccggtggaggcgagggtgatggtgaaggttccgtccgccgccgacgccgccgtcggggcgggcggctggaacgcttcgctgtgcaattgcgcctcctcccatccggccgcccgcgcggtatcgcgaacccgggccataaatccgggcggaccgcagaagtagacccgggtgtcggcgtccggagcccccagatcctgcgccagccgctggcgcggactctgcccctcgtctgagcagtggatctggcagattccacccgctagctggcgggcgatctcggtggcgaaggcggcctcctgcgcacggctaacgtaatagtgcagcgtaaagctggcgccggacgccgcccgggcgtgggccatcgccagcagcggcgtaatgccgatccctgcggcgagaagcaccacatggccgccctcgtgcagcggaaagtggttgcgcggggcagagatcatcaatggctgtcccgggcgcagggtgtcatgaatataacgggagccaccgcgagactgcgactcgcgggcgatgcagagcagatagcgatcccgttcggccgggttgccggtcagggagtactgacggatcagcccgcagggaagatggagatcgatatgggcgccgggcgtccacgccggcagcggttgcccctcggcgctcaccagacgaacggccagatttttcgcgccctggcgccacaggccatcgaccaccaccgggagtatgtcgcgcatatgacctccactcataccagaaagaaatcgccaaagcccatcttcttcagcccgcgccggtaggcgatagagctgcggtccgccggaatatgcgcctccagggtcagatccagcggcaaccgttccggacgctgggtctcgaccatcaggcggtcctcttcaaatacccgcaggttgaacgcatgtacgtcttccaccggcacgtgcagatcgaagttgcgggcaataggggcaaacatccgcgtcacccgggacgacaccggcgaggcggcgttcatgatcaccagcctggcgtcggcgggaaaatggatggtcagcgtagcggtgaacggcagatgcatttcaaagtgacgcagccactggaacccttccggcgcgcggaaatcggagctggccgggtaattgcccaccgagctccagtagtcggcaacaaagccgaacggcgtctcctgcggggtatagtccggcacctgctggttgtccggatcggcgaaggtgtcggtgtggatccacgcgaagtgggcgacatcgagaaagccttcgacctggcggccggcaaatcccttcacctcgaaggccgggcagttgatttgctgaaatcccgcgtcgtcccagtgcggcatggtcggtaacggcggcggattgtccggatcgcaggccaggcaggtccagatcagcccgtagcgctcctccacggcgaagctggtgagatgcagtttggccggaatgggttgccccggactggaggggatgcggttgcagcggccatcctcgccaaagcgcaggccatgataggggcagacgatgccttcctcttcatgaaatcccagggtcagcggcaccccgcggtgcgggcagacgtcgcgggcgaccaccacctggcctttaatacgatagataaccagctgttcgtccagcagggtggctttcaccggggcgccggcaatatcgcaggcgcgggccaccgggtgccagcagcgggccagccgcagccagtcctctggatcaaaggtgcaatgggcggggggcgtgggggtggttgtcttcatgatttctcttcctgctcacatcggtgattgttttattgttgtgagattattgttgtcatattagggtgttcacatccatcaccattaattcactctgctgttgcaaaaaagagtacaggggcgccatgagtccattttcccgtttcgcgcactatttcatcgccgtggcccgctgcggcagcctgcgccgggccgccgagcagttgcatatttccgcctcggcgattaaccgccagatcctgcaggctgaggaggccttcggcaccccgctgttcgagcgcctgccggagggactgcggatgaccaccgccggtgagttgctgtatgacaacctgctgcgctggcaaaaggagtttcgccagacgcggcagaaattcgatgagctgcaggggatgaagcgcggaagcgttagcgttggcatggtgcaggcgctggcggaagggggtttcgccgccgcgctggcggagatcatcgccagctggccgtggctggagctggatctgcaggtggctgacagccacaccgtcagccagaaagtgcgtcaggcggacctggacgtcggcctgatcctcgatccgcaggggcaggctggactcagcgtgctggcctttgccgaactggaggtggggattgtgatgcgtccggaccatcccctggcgggggcgaaggcgctgtctttgggcgagctcagcctggagcggcatatcgtgcccggcgcgccgctgatcgtccatgagcgggtggcgctcctctatcgccaccatgactttgcgccggagaataccatcagctgcaatgatatccggcttatcaagtcgttggtgctacgcggcagcggcgtgacgctccttagcctgctcgacgtgctggacgaggtccagcgtggacagctggcctttgtcccgctgcgcagtacgctgttgcgaccgctgaccctggcgctgtgtactgcgccctcgcgtcagctttcgcggcccgcgcaaatggccattcagacgctgagtgcggtgatcgaatccatggcgacggtcagcccagcggcccgctgaggatggtgtcgcacatgccgttgataatgcgctccccggtctcctcacgcagctcctggtaccaggcttcggtgagctgcatatccttcccatgggtaatatcgcaccgcttgcgcgccttcagcaccaggtcacgaacccggtcgcagcgctgggcttcatactcgcgcagggcggccgcaatatctcgggtctggcggaaaacggcgcccagcaccactgcatcttccatcgccgcgcagcctccctggccaatatccggggtggtgctgtgtccggcatcgccgagcagcgcgacgcggccgcgcaccaggcggctgaaaggttcgatatcatggatttcaatgcggttggtagtctgcgggtcgagggcggcgatcagcttctgcaccggcggcgcccagccggcaaagtagcggctgaggtcagcgcgcagggtgtcacgatcctccgccagacccgccggaagcggcacatcaaagaaaaagtagaaccggccggcggagaccggcatcagcgagacgcgcttgccttcgccgacaaaggtggtccactgatcgccgggggccagcgcttcatctatctccaccagaccgttccagttgacgtagccggcgtagcggcgctgcggggtaaagcccagcacccacggacgcagtgcggaatggctgccgtcggcggcaatcagcagatcgccgctggcgctgctgccgtcggtaaaccataccgtcacgccgtcggcgtcttcttcaccgcgggtgacgcgtttgccgaactgcacgctgtcccgtccccagtaatccagcatttcccgctgcagttctgcccgggagaccgggcaggggcggctgccggtgcgttcgatcagcggggcgagactgaactgggtcatgttctcgccgctgcggaaatcacgatacgccatccggcgcagcggcccgccgaaggtctccatgatgtcgcccatgccgaggtgggccatgcacttcacgccgttgggccacacggaaatcgctgcgccgaccggtttgatctctttcaccgcttcatagacgtcgcagtcgatccccgactgtttgagcgccactgccgcgcttaaaccgccgatgccggcgccaatcacgattgctttcatttttttctccttctcccgatgttgtgactgactacagcaatttgcgtaccaattcgccggagggaggaaaaccgcctgcctgaggcacagcgatggctcatgacgcaccgcatcggtgcaatgtgaggtattggttgcctttttatgaatcaaaagtttctgtatgttgcattaagaatctatcgtttcaggcgcctggttcagcagcggagaggggtgatgcatcacgagcgtaatctaagttgatgattttggagtgataataaatttattggtgcccttttgtcgtctctggcctgctttgtgcactagcccatgcacttctctttgctacgggatatcactatgtctgacgaacatcacagtggcctgctttacggccttgaacagcggatcccaccgcttccggcctttttcagcgctctccagcatgtgctggcgggcctggtggggatcatcacgccgccgctgatcatcggcgctaccctcgggcttggcgactggctgccgtatctcatcagtatgtcgctgctggcctcgggcatcggcacttttctgcagtccaatcgggtatggggcatcggcgccgggatgatctgcatgcagggcaccagttttgcctttctcggcgtgacggtggccggagggatgtgggtaaaagcccagggcggcgggccgcaggatatgatggcgatgctgtttggcgttaactttgtcgccgctctggtgccggtgattgtcagccgctttatcgaaccgctgaagaaaatctttactcccatcattaccggcagcgtgattgcgctgatcggcatcagcctgatcaaggtcagcgtcatcaactggtgcggtggggaaaaggccgaggatttcgccagcatgagcaatatcgcgctcggggcgggcaccctcggggttatcgtcctgctgagctgcgccaaaaaccgctggctgcggctctcctcggtggtggtgggcattgccgtgggctgcatcgcagcggggctgagcggtcagttccatcttcacagcctgggcgacaccctgtttcgcctgccgacgctgtttccgttcggctttcagtttaacagcgcgatatttctgccggtcgccctggtgtcgctggtctgtattctggaggcggtgggcgatctgacggccaactcgctgatttcgcaacagtctgttgacgatcgcgctttccgtaaccggctgaagggcggtatcctggcggatggcgtcagctgtatggtggcggccatgctctgtgcttttccgaacaccaccttcgcgcagaacaacggcgtgatccagatgaccggggtggccagccgctatgtcggacgctacattggcgtgattctgatcctgctcgggctgtttcccccggtgggcgaactgctgcggcagatcccggcgccggtgctggggggcgccacgatggtgatgtttggctgcgtggtggcggccgggatccggattattacccagaccccgctgagccgtcgcgatgtgctgatcgtggggctggcgtttggcgcgggtcttggcgtggagtcggtgccggcgtttctcagccattttccgccgatggtcggcgatctgttcggttcggcggccaccagcggtgggctggtagcgatagcgctgaaccttattctgccgcaggagcaggcggcgacgaaatcgttaaggagtcaggatgatcgcgctgaatcagtttaacagcctatgtgaagatgaggcggcgaggctgttggctccctgcgtggcgatcccggcctggagcgagatgctggtaagcttgcgacctttcgccagccgccatgcgctgctgcaggtcgcccgtaaggcgatggctaactggggagaggacgagctgaacgcggcgctcagcgcccatccgcggatcggtgagaagccgaccggcagccaggcgcacgcggcgctgtcgcgccaggagcagtcgtcggtggacagcgagaatgagcggctcgcgcaggccctgcgggagggcaatgcccgctacgaagcccgctttggccgggtgtttttaatccgcgccaaagggcgcagcggcgaagagattctgcaggcgctgacgcgccggctgcagcataccgccgacgaagaagtggccgaggcgcttgcccagctgcgagagattacgatgttaagactggaaggagtgattggcgaatgagcaccctgagcacccatattctggatatttccaccggtacgccggcagaaggcgtaacggtcagcctgagccgggagggcgagacgctggcgaacctggtgaccaacgcccaggggcgtatcgccacctttagcgccgcgccgctgccggcggggcgctattgcttaacagcggaaaccggggcgtggtttgcccgcgccgggcgcgagagcgtctttacccgggctcagattgattttgttatcggcgaggcggcagaggaccatttccatctgccgtttctcatcgccccgggcgggtggtcgacctaccgcggcagctaagccggctgcccgctgccgggcggcgctgcgcttgcccggcctggatcgtaacggagcgggtagagacagcccgtaggcccggtaaggcgcagccgccaccgggcatgtacaggtggctccggcgatcatccttcctgttttatccccacacaaggataattattctcctatccccaccaggggatatccttgacattatcccctatagggtataaaaccaattttatcccgacagggggataaatgatggtgaggaacaaggcgatgaattccccgcagatatacagtcccgtgcagctggccaattacctgaagctgctgcgccagcagaaccactggacccaggatgcgctggccaggcggatcggcattaagcaggccacgctgtccaattttgaaaatcaccccgacaaaaccaccttaaccacgctgtttaagatcctccagtcgctggggtggtgatgacgctgaacgccaaagctgctgagacggcgccggctcccgataacaacacggaccttgactggtaatggcgacgcttaccacctggatgaacaatgtgcgcgtgggaaccttaacccgccaggctaacggggcgcacagttttcgctatgacgaagagtggctgcgcagcccgcgcgccagaccgctctccctctcactgccgctgcagtatggcaatatcactgccgacgcggtgtatcactattttgataacctgctgcccgacagcccgcaggtccgcgaccggatcgtcaggcgctatcaggcgcgctcgaagcagccgttcgatctgctggccgaagtcgggcgggatagcgtaggggcggtgaccctcctgccgccgggggaagaggcgcacctggaaggattacgctggcagacgctggacgaggcgcagctcaccgctttgctgaccgcttaccagtcggatatccccctcgggatgattaccagccaggacgatttccgtatctcggtggccggcgcccaggagaaaacggcgctgctgcggatgggcgagcagtggtgtattccgcagggcgccacgccgaccacgcatatcattaagctgcccatcggcgagatcaagcagcccaatgcgacgctggatctgcgtgaaagcgtggataatgagtttctgtgcctggcgctggccagagaactgggcctggcggtgccggaagcggagatcatcaccaccccgcggatccgcgccctggcggtaacccgcttcgaccggcgctgggcgcaggagggacgggtgctgctgcgtctgccgcaggaggatctgtgtcaggcttttggtcttccttcagcgatgaaatatgagtctgacggcgggccgggtatcgccgcgatcatgacctttctgctgggctcgagtgaagcgctgaaagatcgctatgactttatgaagttcatggtcttccagtggctgacgggggcgacggacggtcacgcaaaaaacttctcaatttacctgttgcccggcggcagctaccgcttaacaccgttctacgacattatttcggcgtttccggtgctgggcggcacgggactgcatctgcgcgatctgaagctgtcgatggggctcaatgccacaaaagggcgtaaaacagagattaacgccatctatccgcgtcattttctggcgacggccaaagcggtgaactttccccgggagcagatgctggcgatcctccaggagtttgccgggcatgtgccgcaggcaatcgaaagcgctcgccggacgctgccggcggacttttccagccacgtctggcaggccattacagagaacatgctgaagctgcacgcccgcctgcagcaagggctgcaggcgctatagcagagccggctggcggctagctctgcggctgcccccagcggctgcgcaaatagttaaccgcctgccgggtttgcggctgattgaggttgttttcgcggaacaggatggtgccctggatctgcggcagagtctcattgagatcgagctgctttttcagctccggcacgccgccgtccaccgtccagtcaggctcatttttggacggttcacccaccttgtacagcgccacgccgatatacagccgggtatgcgtcggtttaaccacctcggcccaccagttggccagcacatcatagcgcgcggcatcgcgggcaaacggccagtagatctgcggcgcgatgtagtcgagcagtccctgctgcacccagctgcgggtatcggcataggactcatcataggcggccgcgccacgggtatcggaccccgccggatcgtgggagcggttgcgccacacccccgccgggctcacgccaaactcgacgttcggattgagctttttgatagtagtggaaacctgggctatgagctgctgggtgttatgccgccgccagtcgcccttcgaggcatagccctgcccgtaacggcggaaagtctcgttgtcgttaagcggggaagaggcggtttcggtatagaaatagtcgtcgaactgcacgccgtcaatcgggtagttctgcaccacttcagcgacgatgctggtgatccagtcccgtgcttcgggaatgcccgggtcgagaacaaagcgatcgctggcggtgcggatccagttacggtgcaggacgaacacgctggccggtacctgagtaagggtgttgttcagctcggcaatcgtcgacggtttggtgttgaccgagacgcggtagggattaaaccacgcgtgaaccttcatgccgcgcttgtgcgcttcatccagcataaactgcagcggatcgtagccagggtattcgccgattttgccggtcagcatatcggaccacggcagaatatccgaccgccagagcgccgtaccgtccggtttcacctggaaaaagacggtgttgatccccaggcgctgcaggttatcgagtttagcgatcagcgccagcttctgctgcgtgatgcgactctccggcgtgctggcgataatcgacccgaccggcggccagtcaaggcgcgaaacggtggtgagccacacgccgcgcaccggctcccggtgcgcctgcccggctttgacggcggcagcgttcggcggcgtgacaagggatttaggggctttactggtgcagctgaacagcatgccagcggcgatgagcgccgcgcctgccagcgccactttgctggctaaggggaatcgacgagaatggctgatgatgaactcccgtgtactcagatcgtcgcgtgtaggcgctattctcttacgattcgccggtcagagcaattccttcatccgcttcatccgtcggttcgccatcgcctagtcataatgcaaggtataggtcgcgacggccgacacctgaccggcggtgatccgggaacgtgtctggtagtagcgggcagtgagcggcagggtaaaccggcccgcgctcgcgctgcccagcgtcatctcatgattcagggaaaccggcaggcgatggtaaagcaactgcacgccaataccctgcgcccgatcgtcggtggcgtcattgcgcagaacgccatgcccccgggcggagaggggctccgcgccgtcaactcgcaggaaaatcgtgaccgcgctgttgcaatccagctgcagcgcgaaaggggtgtcgccggtggttttgccgacgccgccgaagtggtcaagcatcgccgcagggagcttgatcagggctggcgtggcgtcattcactgaacatcccgcggtgctgatcctgccggttaagtctaacgcggccagcggggtatgctccgccattaaaaagcgctcgctgtgatactcaagctcgcccggcgtcgccgcgggaccggttttaatgagctcaatcgtcaggcggaaatagcccagtttccacaccgcatcgggcaaggcggcgggattgtccacccgttggctaaacggcgagggcgtcggccggtcaggaaagccgccatagccgccgatagcgcgcagcgatacgcgaacgccaatgccggcgaggttagtttgataaaccgtcggtcgcgtcactcccccggacagcagactgtccagcagcagcggcgacaacccgtgcggatcgtccgcgcagcggatccactgttcgccgccgtcgctaaggcggttccaggcgaaacttttatgatacagcggggtgccgggtctggcgtcagccggaaccgtgagctgccccacgttcagccgaagggtggaggcctggccgcggacaaacactggcgtacaggcccatccgctggcggccggtaacagaataaataacagcgtcagggcgacccgacgcaggagagttaaaaaggacatgataacgtctgctgtaaaatgagtggatggggggtctgcgccagcgtcggggtgagatcgtagcgggcgctacagcgctgctgagggcccggcccccattgcgcataaagggtgccttttggcgccaggccggccaggtacacctgaccctcgctggcaacgatgctgttggtgtctttggcgcgtacttcgctgccaaagggcagcggttgtccccgcgactgcagcgtaaacagcgccttatagccaacgtgggtgtgaaagcgcgccagaaccaccgcgtctttggtagggaccagcgtcacggtgctgttggccagatccacattctccggcagcgaatggctgtcgagagagacgtcgttgcggtgataggcggtggcgaagggcagcacggcgtacccgtcaccattggtggcgatggttttctggttggcgagggtcacacccccggcgccaccggcgtcaatcaggacgacagcgccattcatttccggcgtaaagactaccccgtggcggtgaatcagaatgcccccgctggcgccgtagttcagacgagcggcctgcgaatcgtggctgtagccgagattcagatcgccccttccactgctgtacccggccgtcaggctgccgctggacccgttttgccgatcgcgggtttggctgacggcgtagctaagcgcgtgattgtccagcaatgtgccgttgaggctgaccatctgactgccaacgctgtggcgggaggaggtcagggtatagccggcatagctccccggcagcaggtggctcaacggcacggaaagtgacaacgtcaccactttgtcggaatgcggctcgtcatcctcctcgtcaccgtggctgctgcgggagtcgctgtagctgagcgaccacgcgataccgtgaacctggctgctgatccccatattggcggtacgctgtgtggcgccccctgaccagtagctgtcctggtcgagactcagatagagggtgatatcgtacggcaggctctggctggcggtgatttgcagggttgcttttttgttgtcgctatcctgcaggtcgtcgtcgctacccgggctggaaaacgcctcgctcagcgtggcatagcgctgatgcgaataacgccagccggtgaaagtcaactgcgtgccaagacgatcaaaacctttgctgtactggagctgccaggcccggccatcgatcggatcctgctggtgccggtcgcgggcgtttaacagctgcagcgagagcgccccggcttctcccaacccctgtcctgcgccgagcgagaggttatggtattgcgccgcgctctgcagtccgccaaacagcgtcaggttgtgggcgaacccgcgcatcagcgacagctgcatcatcaacggccgctggctggcatcgtcgctatggtagcgcccggcgaccaggttgtatttcaggctgccttcgcgctgcatgctggtcaccgaagcatacggctgggtgaagcggcggatttcgccatccgactctttgacggcaacctcaagattgccgctgctggcggtgggataaagatcgtcaatcacgaacgcgccgggggtgacgtaggtttgatacagcacgtagccattttgccgaaccgtgacctgggcgttggttctggcaatcccgcggatggtcggggcaaaacctttctgcgagtccgggagcatcgcatcgctggaggcgagggatattccctgaaactgtaccgcgtcaaacacatcgcccgacgtgaaggtatccccgagggtcagttcactctgccagcgcgtcaggtcgcgctcaagccaggcgccgctggtcgtccactggggcttatcatcgctgttggcggtcaggctattgctggcgcgcaggcgccaggcgccgacgttcacgccgcttttcaacatcagatagttatcgcgctcggtgctgccctcgcgggtacgctggctggcgcctgaataacgatagttactctgaaaggcgctaataccttcgtcccacagcgcagagggaacattatccctcgcccggtgcgtcatcagcgcctgaggaatggtcattaccagccgctgatgagcaaaatcgaaattgaccgtgctgcccggcagcagcgcgttgagttcgggacatgagcgggacgttgcgccgggcgcctgggacagcacggccgggttaactccggcctgcagcagatcttccggcttaaggcagggcgtgagctgtccgcgatcgttctggcgaaacgtgacggtcttacgggcgtccagcgtgacgccgttgacctgccagctcaccggatagtcgcctggcggctggcccgcctgctgattgaagcgttgcagatccactgccggcaaatggtcgtttttctccagcagatccatattaaaggtcgcctgggcgtgcaagagcgcgctctgtccgcccagcaggatggagaggctgacgatggtaacggtatgagccgggccgtggcgcatcgcgacatcagacgcttagtgcgccgaaacgggggcgctaaacgtctgcacagcgccaaagtcatccagaatgcgccagctcacctcgcgggcgcaggcctcgccgggtagggaatactcttcacggctgtgaggagcaatcacgctgcgctcaagcggcgttttctggttctggcccgcgcaggtgagcgtggtgatagtcacataatagggggaggcattctccgcctgcaggtggttgtcgctgacccgccagcgcaggtgctgcgccgcgtcgagcgccgagccagggagccctgccgggcgataaatgagcttcagttgattcttaatagcaaattgcagaatgttctcgccagccggcgcggtattggcagggatcactttgatattcagggtgaacaaactttcccgatcgtttggcagttgcgccgaggttaataacacgcgcagatcgttgctgtctccggcatccagacggaacaatggtggggtgacgataaacggtgatttattattatcagccagatcgtctacccagctctgaataagcaccggatcgtgaggattggtgttttttaccgtgatgtctgcctcatggctttgttcattataaatgacacgtgtgccggcaatggcaaccccggcggcagacgccaggaacgggcaaaagagaaggctcaggataaaagccgctttataacactgcataattgaggatccggtcacgaggaatgagaataagggcagggggacgctgcccttggaaaagtggcaatcaggacattctattcgtacacaatatcaatattggccgtggcattaatattgccggcggtgacatcctgtgaggaatcgctcttcagatcggcaataaagttaaatgcaatatcaccgttttcgtcggcttgcgaaaccgccgttttgctctgcttgtcaaaggtcagctgagtgccttccgttgagccgtcaggggaagagaagacttcaatgcccacccctttggcggtatccgcggcgtcagagagcgccagcacggcggcgctggtgccgttagcgttggtgtccggagtaccttccaggctgatactgatgttctgcgccagtgggcaaccggtgaggttgatagtgaacggcgtttctgcggttttcgcttcatgggatttcagcgccgacatatcgacgttgccaaaatcgacattaacatcgccaccgttattggtgatctggcaggactcgttaataattttaccggtgaaattcagtgtacccgccgcgcgggcggtggtcacagtagccagacttaaggccagcagtgaaccaacaaccagcagggtgcctttttctttcatactcaaaccttattaaataatcacaagttaacaaaagcgtttaacatttttaaagcatgttttttatnnnnnnnnnnnnnnnnnnnnnnnnnnnnnnnnnnnnnnnnnnnnnnnnnnnnnnnnnnnnnnnnnnnncatcgtaaaggcccattgataagatgtgttaagctgtaacattatttattttttggtgtaagtataatctcattaaatattaaaaagagtcccatacgtataatgcattatttccgggagataactgttctgagcaaattttacgaaaaagttgctgttattcccggcagttgaccgggtggcccggaataatcatttacgctgccgctattttgcagtagcgtggagtgacggcaggaagccgcaggttgtagggcacagaaacgatgctgtgccgcgcagtgtcacccgttatcaaggaagattgctatgtctccattccgtctcgctctgctatgtctgtgcctggcgccgctggcgtcgtctgctgcgctttccggccaggttcatttttcaggacgggtcatcaatccggcctgtgttatcgccccccggcacgatcgtatcgatgtctcgtgccagcaccattcaccggaacaggtcgccttgacaaacaaccgtcctcgctacgccatgccggacaatcgtggtgaggtcagtattcactggcgaaatgcgcagcatagtgaagcggatgtcattattcgctatcgctaaggcgggataaaggcaatgaagagtaagctgatgcaaggaggtaaaggataaaccgttgtgcggtttatgcgcgcatcagccataaccagcgggcagacgcgcgcgcagaaaatcattcatgaaaacaattattgccgccgcccggcggcagaatcaggtgtcgtctggcgcccaagcgagctccgggatcggaaagcggcccaccgtcatagagaaaaggaagcaactcagcggatccccgactgttcatcgtcgcgtaacgtcagcacctcaaaaccgttggcggtgacggccacggtgtgctcccattgcgcggagagttttttatcgcgggtaaccaccgtccagccatcttttttggttttgatacggctgtcgccctggttgaccatcggctcaatggtgaacaccatgccttcctgcagcacggcgccttctccggggcggccgtaatgcagcacctgcggttcctcatgcatttcctgaccgacgccgtgaccgcaatattctctgaccacgctatagccatgttcctccacccagcgctgaatagcgtggccaatatcgcccagcgtcgcgccaggcttcaccacctcaatgcctttccacatcgcttcataggtagtctttaccagccggcgggccagcggggagacatcgcctatcaggtacatcttactggagtcggcaatcatgcccgctttctcgagggtgatatcgacgttaacaatcatcccggcgcgcagatgttcggtcgctttggggatcccgtggcacaccacatcgttaatggaagtgttcaacacatagggaaaatcgtattgccccttgctggccgggcgggcgtgcagctggttaacgataaaatcttccactcgatcgttaatcgccatcgtcgttacgccgggaacgataaaagtatccagcatatcaaacactgacgccagcagctggccggcatggcgctgccgggcgagttcgtcggcggttttaatgattattgatggcattgatcacctccagcagacggtcagagccggatttcagcatcagcagtttgatctgctggtggttaagctcagggtagagttcgctcatcatgcccagacggatccagtattccgcctgggcattgacggagcgggacatggctttgctggcatcacgaatatcatcgtgcagcagatcggagattttgacgattcccatagatatataccgtaacgattcgtatatacatcgtatacaatccagcgcgggatgtccttggcattttgtggcgtagatggcgagcaccatgcaaaaaagcccgaccagcgggcttatattcagcattttttcgggttaaaaattcgcgctgtgcaccatggcgaaaattacccattagattatcggtatgcagaaagaaaataacatgatggcgacgcatcaatatattttatgcaggtgttaattttgcgtattaatattctcccgtcaggccgggaatccgaaggatttacagcgcgtcagtgagtttatccaccaccactttacccgcattatcgaactgcgtaatgcggaaactgtcgctccaggagcggcgggtggtgaagcggtcgaacagggatacccggcctttgcgctggccatctttacttaaaataacccattcggtcaccgaagaataatgctggctattgtcatgccgactctgttgttcaacaagttggtcttctttttccacttttaaataatcacgcaacatatttaacctccatagaaagtattattaacattactccttttatttnnnnnnnnnnnnnnnnnnnnnnnncaataaaagtaactattagtgggcgacctaagtgcaaaaatcgcggggaatatcactccttcggacggcctggtccactacgcttaacgagagcgtccgccgcgcctactgcggtgtccgggtcagaaagaggccaacaaaaggccatatccttgtattcttaataggcgtaattctgctatatctaatgcgttttgccacgaccgagccacagagagcgctgtaccatgagtaacgatcacctgacggatattgcctatcgccactttattgaaagcgttaaagattatgccatctatatgctgagcgccgacggcacggtcattagctggaatgagggcgcccgccgggcaaaagggtacctgagcgacgagatcatcggtcgctacttcggtctcttctatagcgaagctgagcaactctccggtgtacccgcaaaaaacctggaaatcgccctgcgtagcgggcagtttgaaggggaaggctggcggtatcgcaaagacgggtcccgattctgggcgcatgtcatgatcgataccatccgcgatgagcagaacaccctgctgggttttgccaaaattacccgcgacattagtgaacagaaggcgattaacgaccgcgtcgcctggatggcgcgctacgatgcgttaaccggtttacccaatcgggtggagttttttgaacgggtggagaagctgatcactggaaatgatgcccgccgctttgccattttcacgatcgatttagacaaatttaaagagattaacgatctgcagggccatctgattggtgaccagctgctgcagcgcgtggcgggcgccgtgctcaaaacgctgcagaaggaggagatggtcgcccgcttcggcggcgatgagtttgtggccgttaaacctttttccgatgagggtgaagtggatgcctttgctgcgcgcctgtggcactgcttcagcggtaagcagacgtttgccgcgacggaagtggtgctctccgccagcattggcatctcagtctacccggaggacggcacggatattaatacgatactgagcaattccgatctggctatgtatcgggcaaaaagcagcctcgaccataagatttgctggtatgaacgtgaaatggatgacaagacgcggcagcgcaatatgatggccgccgatatccggcgcggtattcacgccggggagttttcgctccactatcaggctatccgcaacatcaaagatcgtagcatcaccggttacgaggcgctgctgcgctggcagcatccgcagctggggacgatcccgccggacgtgtttattcccatcgccgaagagagcggcgctatcgtgcccttaggttactgggtgctcgagcaggtgtgtaacgaatcgctggaaaatggtttgaacagaaaagtttcggtcaatatctctccggtgcagttgcgccatcgtagctttatcgaaaaagtccgcgagatcctgatgcgtaccgcctacccggtcagtctgctggagtttgaggtcaccgaaacggcgtttgtgatcaataaacagctggcgttcagcgttctgcatcatctgcaaaaaatggggatcagtattgcgctggatgactttggcaccggttactcctccctgagcatgctgcgcgattttcatttcgacgtcatcaaactcgaccgcagctttatgacagatgtggagagcaaccctcaggtacgctcattcgtgcgagccattatttcgctgggcaattcgatcaatacgccgcttatcgccgagggggtggaaacggctggacaactgcagatcctcgaagaggagggatgtgacgagatgcagggatttctgttcggcgagccggtcgatatcaaacacctgcccgaccggcgctgatgcgcccaccctccgctggtgggcgtaagggcgttattgatgcgcaagcgctgcctgcccggaaagatgcagcagcgccgagcgcagcgagacctcgaacatctgaccgtgcgtcaggccggggtagcgccagaaggctacggtcaaccctttactggcaagctgctgttgggtttgacgcaacacctcaagcgaggcctcgtgcccggacggctctccacgggctttaccgtcaccctcgagtaggtacagcgatttcccgcgaaagcggacggcatcaagactttggcttgcctgcaaaggcgattgcagggcctgacctagcgacgggctggcggaatagtagatcccgaacggcgaagccttcctccacgcgtcgagcacaaacaatccgccgtaggagtggccccagatagcgcgctggtggggatctattttcaggttagcttccgtctggggaaccatcgtttcggtcagcagctggcgaaaagcatcattgccgccggttttacgcggcggtagcgcgggtttcccggcgcgaggctcatgcgtctttagcggtggggtgtaatcccaggcgcgggctgcggtatcaaagggcagcgcggtctggtagccgatagcgacgatcaccggcggggagccggcgaagagctgctgcagaaacgcgtcgtcgagtttatccatcaccgcgttgccatccaacatatatagtaccggatagccggcggcgggcggggctttgtccggcactgcggtccatacccggtagtgacgttcgccatcggcagagtcatactggcgttgcgtaaagtggtaaaacgccgaccctttatccgcaatgttcggccccagcggctgaagatccggccgggcaatactgccgctgctgtagaagagtgcgccaatcgccagcgtcagcagcccgctcgtacgacctgttgtgatgctccctgaactcaacttcacctcgtctgtccccctgttttgttgcttctggcgttattgttgggctgacacgttagcacagcttttatgataatggttctcatttctttttctggcgttgccacaaactgtatgctgggggagcgggtggcgggataaacggagatgacgaagagaaggccccctgtaggcggtcataaaagaaaattcaggaacgatcgtgaaggtgactcaacagttttttgaccagcggagtgagcgcaataaacagcagcgcaataattacgatcagcaagagcgtcagccctttatggtggctgataagcaccaacagcatcgccagcgtcatggtatgatcctttaataaatggcgttaaccaccgccaaggtgaataaaattcaacagaatggtcatgaccacccaggccagcagcagatagcgtcgtttatcgcgtcgagcttccagcgcagcaaaatagttagcgctgtaccaggtcgatatgataatagccagcgtgatgatgacctgccagatcgcctcgctgaaaccggtgacgctgcttatgccacgaaagcagaggacaatcgcaataccgttaaacgcattacacatcagccatccccacagacttgcgggtcggctaaataaatatcccaatcgtaaaaccaatgtcgtattcaccctgctaaaataatcgcgctgtaaaatgcattttaacgatcgaacaggtattgatataaatcaaaactaatggaataccgcaggaatcactggcgtacggtgctaacagcgcaagcaataaacctgagggtcagtagccctggagaatatttaactcattgttttaatggttttttagttatgagatgcctgcgctaatgcgcgtacttcaagcaagtagcaatacgttggtttctctggttattattaccattgaggttataacggggagaatcagattattcgccatgtttgctgggcgaggggtgaaaatccgaccggggccagagctccggtcggtgtcatacttaatggggcaaggcgttatgctgcagaattttcaggaaatcatgtttgtcggagattaatgacagtgcgttagcgatcagctcatcgctaaatatcgaggcaatttccttgagtacgtcaatatgctctttctctttcgcgatcacgccgatggcaataaacattacattgctccgatcccagattacgccatcaggaaactgatagatctcaatcccggttttaaggatgatatccgtcgcggatttcggcaaatgcggcagggtgatgccattgcctaaaaaggtcgagacctgatgttcacgctccagcagaaagtggacacattcctgattgacatagcctttggctttaaactccgcgccgatcatggcgatgacttccgctttattactggctttgcagccaatatgcagattatccagcgtgatgttatcgatcataaccaacctccctggtgagacgagtggattttttatcttcatggtttgctgacagctctgcttctaactgctcaagcgatttattggaggtctcgggcagggcaaagaccacgaaaagaatggctaaatagttaatggcggcgaagataaagaagactggcccaaggcccagttttgcctgcagtagcgggaacagatagctgaccaccgcgttcatgatccacatgaaaaataccgagatccccatcgacagtccgcggaatttcagcgggaacagttcggctaataccacccaggtaataaagcccatggagccctgcatcacgccgacgaacagcgcgcccagcagccagatggcggtagctttcaggtcacccaccagggtgtaatcgacagcggcgataatcagatgcagggttgccataatggcgaaaccgtagatgatgattgtcttacgtttgaagcggtcgacaaggaacagcaccccgatcagcataccgcccacggagaaaacaccgttcagcacgttgcagatcagcgaggttcgttcggagaaaccggcggcactcaggatttccgtaccgtaatacataatgacgttaacgccggtggtttgctgcagtgcggcccatgtaatgccgaccagcaaaattttgaggatccagggtgttttgacgatcgtcgcaaaggtgctctgggcgctgtacttattaccagcttcaattttgatcagggtagagatgtcatcgtactccttctgcgcgcgttccgccgggcggatttgtttgaggatatgcagcgcttcatcatgacgatttttgctgatcagccagcgcgggctttccggcgcgcgccacatgccaacgaacaggcagatggccggaatcgcttgtaccagcagcatatagcgccagacgtccggcagatggccccagatgatgccaatgatcgcgttgatggcaaacgccgccagctggccaatgacgatggcgacttcattcaggccggtcagcttgccgcgcatctcggtaggcgccacttctgaaataaacgtgggggcggtgaccgaagcgccgccgacggcatagcccagcagggcgcgggcaatcagcagggtagtgatatcggggccgcggcggaaagcaacgcgccgatgagaaaaacaaaggagagaaagagtaaatatttacgccggccgaagtaatcggcaaatttgccgccaaacacgctgcccagcgcggcgccgaccagcagaacgctcattaccagcccttcggtggttggggtcagcgccatgtactgcttcagtgaggaaaaggcgccgttgataacgccggtgtcgtaaccgaaaagcaggccgccgaaggtggccactaaggtgatctgatgaagtcgttttctctgttgctggttcaggtttgttataaatgacatggtagtccctttattttgttgaacgacacaagataaaaatacatctccccagtcaggatttatcacgcctgtgttgtcgtatctaactgaattaaatgattttcttctttgtgtaattgctcagcacaaggcagggtacgctaagcaatggcggtcaaagaggtttacggcttggtgttgacatggatgtagtcgatatccgttctcctttgcgggttagcggtctttagtgcgtcagtcgcgacgacatttgccgatgaacagcgctctggtgtggcacgttgctgtcgctccggcgatttaccgtggtaagaatatggcacaaagaaatggaatgaacatgcaacaagatcacattatgaaaatttaatttcaaatcagtgttgcagaatggtaaatgcatgaagccaatcacaaaggctaaagggagtatatccccatgaaaagcaggttaaatttacagtgaggtaataacgatgttgttttcagtgggttaatgtaaatcgaagaatactacgcagatcacatttttacgccataatattgaagaatagaatttatatttcattgtcacgatcggggcaaaatgaagatagaggccttttacctccggtctgaagggggaaatgagcggttcgggggaggaggttaaggatgaatgcatcaccgggggaaacaccgggtaaaaatgcagagaaggtggattctctgcatcttacccatcacgaaaaagatcagtgcagtgcgggccagtagccttcgttggcgacgatcagttcatcgaggatggctttcgccaccgaagcgctgggcaccgttttcgacagggcgatggcctgccacagtttctggtaactgccctcaatccaggcgtcaaccaccagtttctcaactgccacctgctgctccatcaaccctttctggaatgacgggattttccccatcgccagcggttccggaccgttaacgcccaccaggcaggggacttccaccatcgccgtctcatcgaagttggcgatggctccgttgttctcgacgatcaacagcatccgctcctgggtgttaaaggcgatggcgcaggcgaggtcgacgataaaggtggcatgggccccggcatggaaatgcgcgccttccgccgtgccgcgacgggtgatctcccgggccatatcaaagacctctttttcgcgtccggccatcacctcgttggcccgcgtagactccgggtcggaatgcgccacttcatagtccgggtagagatagtatttcagataggtgttaggcagcgtcgtcggatcgagggcaaacacatccttcacctttttaaaggtctcgatccaactcggcgccttatgctgaaagtcttcttttgggctgctgtatccctgctccgccacgtgacgcttcagcgccggcatcaaatcgttaccggctttatcggtgatgctggtccaccagccgaagwggttcaggccatagtaacgaacgttcagcgctttgcgcgacggcaggccgaggatgtcggcgaacagaccctcgatagccaccggcatatcgcagatgttgatgatgcgcgcgtcgggccgcaggcgacgggtcgcttccgcgacgatagccgccgggttggagtagttgagcatccaggcccctggagcgtactgctgcatataatcgaccagctccagcaccccggcaatcgagcgcataccgtaggcaatcccacccggaccacaggtctcctggcccggcacgccatatttcagcgggatcttttcatccttttcccgcatctcatacaggccaacgcgaatatgcgccatcacgaaatcgacgtcggtaaaggccgcctgcggatcggtggtatagctgaacttcacctgtgggaagcgttcagccaccaggatggcgcaggcgtcgccgatagtcttctgacgctggtgatggttgtcgtacagacggatctcccgcaggggaaagcgcgacatattttccagtaacatcatcacaatcccaggggtataagtactgccgccgccggcaatggtgaccacaaaattatctttcatttaccacctcgttattcaataacacccagactggcgttgaccgccgttcgaattttgttaactcccaggccatagataacctggacatggtttcctttaatcagcacgctgctcccgccgctctctttcaacagcgtctgctggataagggcggggtcccgcacatcaacccgtagacgggtaaaacagttgcccaccgcacagacattctctttccctcccagcccggcaatcaccagcgcgcctttatccggatgctcgctattagcctgttgcgaatgctcatcttcggctgcggtttcgcggcccggggtgagcagccgcagacgggtaatacagaaggtgccgaccaggtacatggtcgcggtttccagcagaccgagggcgacaaacaccggccagcgcgtcgcgctgactcccgccgggaggttatagacgacgaaatcgatgaggccgttagtggcgcagaccctgacgtgaagcagccaggccagcatctggaaaaaaccgtccagcagggagtagataagccacagcaatggggcggtgaagataaagagaaactcaaaaggttcggtgatccccaccaggacggaggtaacaatcaaggggatcagcgtgactttcaaccgctgcttattctccgctttcgccgtacggtagaaggcgagcgccatgccggcggtgccaaaaatcttcaccatcccataggtgaggaaacgggcggaatcactgagcgcgtcaacggggtggcgggcgatttcggccaggaaaataggcttagcgccaatgacggtctgaccatcgatcagcagctgaccgccgatagaggtaaaaacgaacggcgaccagatcagatgatgcagcccggtggggatcaggaaccggttgagaaagccgtacaggaagaccccgatggcgccaaaggatttcataaagccggtcagcgccgatatgcccagctccactaccggccagagatagacggtggcgatggcgaacatgccaaccagcggcagcatcacgatcagcaccagcttactgttgccgtagatcgacagcgcgccgcgaaactcaatcccaaccacgcgattatggacaaaggcgacagcgcagccaaggataatcccaaggaatacgcccatatcgataacctgaaaaccgaagataaaggtttgtccgctgccgtacagttgcgcgttggtggctccggtcgccaggcgatgggtgagggttagccagctattattcgccgccaggtacatcagccaggtcatggccgccacgaaggccgcttcggccttgcgggttttcgccagaccgctggccagcccaaggcagaacagaaaccctagatggttcatcagcgcccagagcatactggagacaaatttccccaccaggtagagcccgctgctttcatccacccacagccggttggtcgtcatgctgaacagggcgatcaacaggccgatagctggcagatacagcaccggcccgatcatcgccttggaaaagtcctgaagctttttcactccaatcatggttgtcctctcgtctttgcagaccgctgtcatcacctgatgaataggcttatcagactaggagcagacccccgggatcccgagcaggaaaagggccatctgtgacgaaagtcatatatattgttgctggacagatatataaatatggcgtgatttatagatgtgtcattgttgattttttcgccgaaagataaaaataatcatttaattacatgaagttattcatatctaccgttgactggcgccactccatcgagacatctaaaagtgatttataaaaagattgccactgaactgaaggcccgcatcaacagcgacgactatgccgtcggcgatatgctgcccagcgaaaaagcgctcgccgcggagctgaaggtctcggtgatgacgctgcgcaaagcgctggcgctactggaggaagaaaagttgatcgcgcggcggcacggcagcggaacctgcattgtgcgtaaaagtaactatcatggcggggaactggagggctttaactaccagatgcaggtggtgggcgtcaccaactaccgtaacaaagttattgaatttaccctgcttgatgccccgccagccattgcccagcagttaaagatccagccgggggagaaagtgtattacgtcagacggctgcggctgatcgatgaggtcccaatcctggtggaaaacagctatatcccattcgccaccttcccctggctcagcgtgggtaacctcgagcagtctaagttcaactatttcaaaaaagagtgccatatcaccatcatcgagagccaccgcagctataccccggtgctggcgacccgtgagcaggcggagctgctgcaggtggcgccaaacagcctcctgctgcgggtgcagtcgatcagctacgcccagaaccgggcgatcgtcgatttctcagagatctaccagaacaccagtaagtacaatgtgaagcacattacccgccgctagaggattcagaccagccatccccgggcgatcagctctatccccagcgccagcaggaacaacagaaagccctgacgaaagcgctgcgggctgagacgcgagcggatccgctgtcccagccacatgccgagcagcgccggcaacagcgccagcgccgacaatagccatgcatcatcatgccagccatcgtgcagggcgaggccagccgccaacgccagagtggaaagggtgaacgacaaccccagggcctgcaccagctcgtcgcgacgaaagcccagcgcctgtagccagggaacggccggaataacaaataccccggtcgccccggtgataacgccggtcagcccgcccatgagcggcgacagccacttctccacgcggccggaaacctgaaacaccggactgcagagcgcatacccggcataaactatcaatgcggcgccaagcgccagcgccgaccaccgaggattgaggccgatcagcagtgaggacccggccaacgtgccaataataatcccggtcatcataagccagagacggcgtacaatctgcgccagcgccgggcctgccagtaactgccagagattggtgagcagcgagggaagcaccagcagcgccgctgcggcctgcggcggcatcagcaggccaagcaggcccatcgccacggtgggcaatcccatgccggtcacccctttgaccagcccggcggcaataaagatcaacaggaaagagatcgtgtgtaaatcgaacattatggctcacttttcagggtagaaaggggcattgaaacagctggtcgtgagggccacaatgcggtatgttggccatagactacggaaaaaccgaagggaaaggagggcctgatgcgactggatctggccgatctgcggctatttatcgccatcgtggataccggcagtatcaccggcggagcggcgaatgcccatctggccctggcgtccgccagtgagaggctgcgcaagatggaggccgagatcggcgtgccgctgttgcaccgtcatgcccgcggggtgacgatgacagaggccggggaggtactggcgcgccatgcccgcccgcttcttgcgcagcagcagcgtctgcgccaggcgatgcacgccttcgcctgcggtcagcgggggacgctgcgcctgttcgccaacacctcggcgatgtcggcctttctgccggggaagctcgccgcctggatggcagcgcacccggcggtgcagatcgaaaccgaagaacgcaccagcgcggatatcgtcagctgtatcctggcgggcgtggcgcaggccggagtggtgtccgatgcggtcgaccccgggccgctgcgcctcgatcccgtcgctgacgacccgctggtgctgatcgtgccgccagctcaccctctggccgaaaaagaggaagtggcgtttgcggcggtgctcaacgagccgttggtcgccctctatcagaccagtgcgctacagcagcatatcgaacagcacgcagctgaactcggccaggtgctaaacgttcgggtcaggatgagccattttgcagggctttgcgagatggtggcgcacggcgccggcggggcgatcctgccgcgcgttattgccgagcgttaccggcagcgctattcgtttgccgtcatcgggttacaggaccgctgggcgcagcgccgtttgtgcctgtgctaccaggatgacgccagcctgtcgccagcgatgcgccgcttactggaatggcttcgtcagccttgagaatatcagtgacagtgtcacttttcatgcccgttattgctactgacatccgtgccagagatgcgatagtagaggtccgcttttattaagacgcgaatcaggacagacaagatgagtacattaccaaaggtcgcggtgctgggactcggcgccatgggacacgcttttgccagtaacctgctgaaaaacggctttaccgttgccggctggaaccgttcgccagcccgcggcgaagatttacaggcgcatgggttatctctacacgccacgccgcagcaggcggtggccgatgccgaggtgatcatcagtatgctcgccgacggcgaggccaccctcgaggtactggcgcaaatcgcgcccgcctgtcagccgcaggcgatctattgccagatgggcaccattggcctgccggagacccggcaggccatcgcgttgttgcgggaacttcagccagcgatgacctatatcgatgccccggtgtcggggaccaaagccccagcggagaaggcacagatcctggtgcttgccagcggagatagggaaaagggcgccgctgccgaaccggtgtttgcggctatctcccgcgggacgcagtggtttggcgaggcgggcaacagccagaaaatgaagctggtcctcaatgcctggctgatttcgatgatgcagggcatcgcggagagcgcccagctggcgaagacgctgggcttcacccccgaccagctgtggagcgccctggaaggcggcccgctggcggcgccctatgtcaaagtgaaactggacgccatcgccagcgagcagtttaccccgcagatgcagctggcgcatgccctgaaagatgcccggctggcgctttccctggccgagccgcacaccatgccggggctggaatacatcgccgaactgtggcagcaggcggcggacgcgggatatgccggagaggatttgtctgcggtatatcagtggctgtcgccgtcgtcaaaagcgtagtttcctacccacgccaggaaagaagtggccatggtggccacttatcctggcggatggggcatcaattcgaatctatcgtacgttagcttaagctatcaatccattcgctctggcgcggattcagccggcgataacagtgtaccgacaccgccagctgcgtcaggtcggtgaagaccatcggatcgagctgtatatgctttttaatttgctgcagccgataggtgagcgtattacgatgaatccccaacagcagcgacgttttgcccggttcggcattattggcaataaagctgctcagggtatccagcagcacttcgccggaatcatgctcaagcagctggcgtacgttattgataaaaaaattgaccatatagctgtcttccagcaccctgaacaggcagagcattgccatttcgcgaaagtagtagatctgccgctgcggctgcactttgctacccacttcgatcaccgagcgggcgaaccgaatggcctcgcgaatgtccggggcgctgtccgcctgcacgccaatcccgatatggtaatggcttatctgattactcagtacaaactcaatgccccgcagcagggtttcctgggcttcgcttagcgcgttgaggatcaatatttcatggctgcccagcaaaataacgtcacttacgccggagagctgcgagaattcccgcaacagcgtactcagtatgtcgcttaactgatgctgttcgacctgcacggtcactacgatcggaacccgcggtgtatcaaaatcgaaaccaagttccagcaggcgatgaagcgcttcttgcccggcgggtgtagccccttgttcaagatactgacaaaacaaggtgtcacgcagacgttgccgccagttggtttcccgcatctctatggcctggcggaccagcagttcggcggtgagcaccgccagttcagcatagcggcttatcgccgcgggatcgccgctgatgcctaccaccatcaccacgcgatcgtcatagataatgggatgattaataccaggatgcacgttgtgaaaacgcgcggcttccgcggcgttgttaatacaaatgcgtttcccggtgcgtattacctcccgggcgacttcatgctgttcgccgatacgatgccgttcacctgaggcaatgatctgtccatgatggtcaatgacattcacgttatgatgaattatcgccattgcccgggcgacaatttcattagccagcgctgttgtaataatcatacagttatccgcttatgtgcctctccgcgccacccgctcagaaaggttcgtagaacattctccgcggcgtcggcgaggagcggttcgcatgtgttcatcgactctgccagcgccatagggcgctggcaaatagaccacattgcgtcaatatggtgttgatataattgccggctgctctcatcacgcccgccgcaaagggccacaaccggcacgccatggcgtgcggctttgcctgccacgcccaccggggccttaccaaaggcgctctgccgatcgagccagccttcacccacgatcgtcagcgcggcatcgcgaagatggtcgtcggcgttaagcagctccagcaccaggtcaatgcccggacgcagcgtggcgccggtataggcgataagcgcagcccccataccgcccgcggccccggcgccgggccgtccgctgacgtcgaatccgagggtttgcgtaagcagctggctataatgcgccattcccgcctccagctcgcagagcgccgcctcgtccgcgcctttctgcgccccatacacccaggtggcgccatgctcgccaagcagagggttagtgacatcgcaggaggcctgtatttcgctttgctgtagacgcgggtccagaccgctcaaatcgatgcgctgaatatgcgccaggtcctgacctgccgcgggagccggcagcagggtgccgtccttacgccagaatcgtgcgccgagcgcctgggcaaaaccgatgccgccatcgttggtcgcgctgccgcccaggccgataatcaaatgccgacacccggcgtccagcgccgcctttacctgttcgcccagcccgtagctgctggcctgacgcacatcccgctgcgctggcggcgtgagttcgagcccacagctttgcgccatctcgataatggcccgctcgccgggcaggatcaggaaatccgcctgcagggagaggccataaggcgaggtacagcgctgctgttgccacagcgccccctcaagcaacggactatccgccagagtcgacagcagtccctctccgccgtcggacacgggcatttcgaccagctccagcgtctggtcaacccggcgcaatccctgggctaccgctgcgcaagcggcctgcgcgctacagctacctttaaacgaatccagcgcgataacaatcttcatacgttctcctgcgttaatgcgctttgcgcggcgttttatcggtggtcatgagctgtaataacatccccagcagcgcacatcccgccatggtaaagaaggcgtagatataacccgctggattttcccagccgccgccaaactgaataagccagcccataagcaatggcgaaatgccgccgccgataaacatcgccgtggttataattccgttagcggtagaggtggcgcgttcttcggcggagtccgacgccatggcgtagtagataggccacacggcgttggccaccaggccaaaaaatagctgaatggcgataaggcgcggcatattggtggcgaaatagaacagcgcaatgccgatactcatccacagaccgcagacgatcagggttcgtttacggccaaagctatccgacagccagggccagattacctgacccagggtaccggtaagcgtgaagataatactcagcccggcggacgccgccagcgacaggccggagacgtgataaagatacgggggcagtacaacgttaatgcccatatagacgatttgcgtcagcagggtattgcccgccgtcagcgaaatattgcggttgcgcagggtgcgtaaaaaggtcttcatcccttcgcctttggcgacatggctgctttcctgcgtcgccgggcgcgtcaacccctggctgtcgatatgctgataaagcgtgttgatgcggtcggcggtagaatattttgcccagaagatcattagcgggatggcgacgagcagcgccagcaggaagcagtagcgccagctgccttcgccaaacgtggcaagcaccaggcttgccaccacgccgctcagcagcgcgccaatcggatagccggtatgatgcacccccagcgcaaaaccacgcttctctttcggccaccactccgcggtgttgctgacgccgacgggttcgccccagccggccccaaggttgacgcccacgcgcagcagcacaaaggccgtcagcccgtggctgatcgctttaatcccggaaataaaagacagcgcggtatagcccagcaccagcggtacctgaaagcgcgctcgtttccagccagacccgtagcgatcgctccagatggagccgggaatatccagcaccgcaagggctaccatgatcagggcgacgatattgccccactgttccggcgagagcgagaactccttagagatgaccgggccaaggcgcaggatcatctcgcgatcgtaggcgttaagcacccagattagccagcaaaccagtagcgaaacccaggagaagcgatgtatcagccgctttttgccacgttgttcgccggcaggtgtgtgattgattgttgtcatagtcgtgtttactccgcggcgtcgcgacagcatgatgcgcgccgcctggtgtcagggtcagagtcagttcgccgggtattattgttatcgcggcgagccggtggttcgtttagccggcgaagcgccgttccgctacgccggtcacgcccaggtcgtaaatggcgaacaggctgccgcgcagctgattatcttccgggaagcgcggcaggggcggctgcgccatggaggtgacgtacagcacatcaaggttttcgccgccgaacatcacgctggtcacttttttcaccggcatctcaatgatgcgatcgaccttgccctccggggtatagcgcaccagcttgcccgcgtagaccagcgcgttccacagatagccttcgctgtccacggtggcgccgtccgccgcgccgccttcgctgcgatcgacatggcaaaagacccgttcgccggaaagatcgccggtcgcggtgttgtagtcccaggcgcagatttcgcccgtccaggtatcggcaaaatagaaggtctcgccggaggggctccagcagggggcgttagagacgataatgtctttcttcagcacgtgcagggacagatcggggtccaggcgatatagcgcgccgctcggttcctcttcgcgcatatccattgacccgaacagaaagcgtccctgacgatcgactttgccgtcgttgagccggttaaagggtcggtccgcttccggatggtgcaacagcgtcagctcgccgctggcgaagtcgagcagatgaacgccattctgcagcgccaccaccgcgccttcgccgttctggcgcagggcgaaagagccaattttctgtcgcacgtcccagctcttgatcgcgccgccctgcgcgttgcaggcgaacaggcgcccgtcgaggctgtccacccaccaaagacgctgctgttcgacatcccagagcgggctttcgccgagtcgggtttttaaatccagtaacacttcaatgcgcataatggcctcctgattacactttttcgccgtgggcctgtttcgccgatacggagcctggggatgaggaacttttgagaaacagggacaccagcgcgccgataatcagtagcgcgacagcgaaccataagccggacgttgccgcaccggtgcggtcctcaaacgcgccgagaataaacggcccgagaaagcccccgcacagcccgaggcagttgagcaggccgaagctgcccgccagcatatgcccgctcatgatggacgggagccagttaaagatgatggattgcatagcgaagaacatgaaagcggccagcgagaagccaagcagcgccacaccgtggccggcaatggcgccaatcgccatgccggtcgccatgaccagatatccggccatcagcatgctgcgggaacgctgttccgtgcgggcgaatcgcggcagcaggatcccacccgcggcggcggcaatccacgggatggcggtcagcagaccaacctgcagcggagtaagctggccccagctaccgatgatccccggcaggaaataactcaggccgtaaaccgaaaactgatgggtaaagtaaatcagcaccagcaacaaaaagactcgggtggacagcgcgtttttcagggagaaacggctcggcgtatggcgcgtttcctcggcttctttcgccagtaccgcgttaatggcttgcacatcgtcgctgtccagccagcgggcgtcggctggtttatccggcagtctgcgccagacgacgaacgccagcgctatcgcaggcagcccttcgataaagaacatccactgccagccgtgccagccggacatgccatcaaggcttaataacaatccgcccagcggcgcgccgataatattggccagacagacccccagcaggaacaggccggtggcttttgcgcgctcttcgcggccaaaccagagggtgaggtagtaaataatgcccggatagagtcccgcttcggcggcgccgagcagaaggcgcatcacgtaaaaggacgtaggcccggtgacaaacgccataccgcaggagaggatgccccaggtaatcatgatgcgagctatccagcgccgtgcgccaatccgggtgagaaacaggttactggggatctccagcactgcgtaggtgagaaaaaacaacccggccccgaggccgaatgcggttgcggaaaggccgatatccaccgacatggtcgctttcgccatgccaatattggtacgatcaataaagctgatgatgtacgccacgataagcagcggcatcaaatggcggtagatttttttatgggtgcgttgcagctgcgtcccgtttaccgccttttcatttattgcggacatggttattatttccccgtattcgtggtcagaagccttgccgggatcgagacgatcccgttcgtcagctcacaggttgtcgccgggtgctgacccgaacgacgcccggcccgaagccccacttcgggccgtcttttgctaagcgccttcgcgctcgaacagcatagaaatcccctggccgccgccgatgcacatggtgaccagaccagtgcgtgcaccgctgcgcgccatttcatacatcagtttgaccggcaggatcgcaccgctggcgcctaccgggtggccgagagcgatcgcgccgccgttgacgttaacgcgggccgggtcgagacgcagatcgttcatcaccgccagcgcctgagcggcgaaagcctcattgagttcaattaaatcaatggactgcacatctatattgagacggtccatcaggcgtcgggtggcgggagagggaccaaaccccataatctccgccccgcagccggcgaccgcccagccgcgaatgcgcatgcgcggggttaagccgcgtttttccgcctgctggcgggtcatcatcaccagcgccgccgcgccgtcgttaatgcccgatgagttggccgccgtcaccacgccgtcggctttaaacgccggacgcagcgtggcgagcttttcacgcggggtgtcgcgcgggtgttcatcggtcgcaaacaggcgggtcgcttttttgccgtccggcacctcaagggccaggatctgctcgcgaaagcgaccctccgcgatcgccttcagcgccttctgctggctcgaccaggcaaaatcgtccatcgcttcgcgggtaataccgaagcgttgcgcgacgttttccgcggtgatgccgttgtgataagggccttccggccaggtgagaatggagatcaggccatcttccagctcgccatggcccatgcgatagccatcgcgcgctttacgcaggtagtagggcagctgggtcatattttcagtgccgcaggcgacgaccacctcgacctggccgctttgcagctgcatcatgccgtccgccagggcctgaagtccggaaccacactggcggttaacggaataggcggtgctctcctgcgggatccccgcgcgcagttggcagatgcgggcgataaaaccgctttcggcgatttgcccgacgttgccgacgatcgtttcgtcgatatcctgcggcgcaatcccggcgcgggcgatcgcttcgcgaatgacggcggccccaaggtcatgctgatgggtatgtttaagactgccgttaaacgtgccaatagcggtacggacgccgctgacaatcacaatatcattagcctgggtcattgtttttctccttacagcaccatgccgccgccgacgttaatcacttcaccattgatatagcgcgcgccatcggacgccagaaacgtcacacactcgccgacgtctttcgcctcgccggcgtaacccgcggggattttgctgatcatgatttgccagacgttttccggtacgccgcgcgtcatgtcggtatcgataaagcccgggcagatggcattcaccgtgacaccttttttcgccagttcgcggcaggcggttttggtcattcccaccacgccggcttttgacgccgaatagttggtttgcccgacgttgccaagccaactggcggaagcgatattgataatgcggcccgcaccgcgctcgcgcatgcggatagcggcctgctgcatacagaggaaagtgcctttcaggttaacgtcgataaccgtgtcccagtccgcttccgttaatttgtgcagcatggcgtcgcggttgattccggcgttattcaccagaatgtctaccgggccaaacgcctcttcggcctgggaaaacagggcttcgacctgcgttttttcagcgatattgcagctgataaacagcgcctgtgcgcccgattcgcgcagggaagcggcggcggcttcgccgtgtgcatcacgatcggcgataatcactcgcgcgccttcccgcgcaagcacctgagcaatgccaaagccgataccgcgtgcggcgccggtgacaatggcggttttactggcaagtttcatagcaacgttccttatgagtcagaggatgaattccgggacagatgttccgcgagaccgcagggcggcggggtgaacaaacggctgtccataacctgaagatccgcggcgatcgccggatgaaaatccatatgcgccaggatgtcgcgctcaagatcgatgccgggggcgatttccgtcagcaccggtccttccgggcgcagttcgaaaaccgcccgttcggtgacgtaatgcatggtttgtcctttggtgcgggccagttcgccgttgtaagaaatctggtttaccccggcgacgaatttacgcacctcgccttcgcggcagatatgcagcgccccgtgttcacaggcgatctccagccctttggcggtaaaagaggagcagaacacgacgtggcgggcattctgggtgatatcgataaaaccgcccgcgccggggcaggatgcgccgagccgtgtggcattgacgtgcccgtgcgggtccatctcgccggcgcccataaaggtgatgtcgacccctgcgccgttgtagtagagcatttgatcctggtggctaatcatcgcgctcagattacggccgataccaaaatccacgccacccgcctgctgcccaccgtagatccctgactcgacggtgatggtgacctgctcgccgagctgttcctcgtgaatgatggcgccaatcacgtcattgggaataccggtgccgagattgatgacgcagccgggggtcagatagcggcaggcaatccgcccgataagcttgcgcaggtccagcggcagcggcgcattttgcgcggcgggcagctggatatcgccgcacagcgctgggtcgaaggcccagcttgaagtctggcggtgatccgtctgcggctcttcgcataccacaatggcgtcgatcaggttgccgggaacggtgatgcttttcggatgcagcgagcctttcgctacgcgatatttcacctgcgccagcaccttcgccccgtagcgtctggcggcgagaacggcgtgcaggacttccagcttcatcacctcttcatcggtcgtgaggttgccgtcttcatcagcatgggtgccgcgcacaatgaccacgtccagaggaagagccggataaaacagatattcgtcgccgcgaaacgtgacgtgctcgatcagattgggtcgttcgcgggtgcgggcgttcatccttccgccctctatgcgcggatcgacaaaggtaccgagaccgacgggagaaagccgccccggcagtccggcggccatcgcgctatagagatgaacgatctgcccctgcggcaggcaccaggcttccacttcgttgttgttgatcatcgccatccagcgcggcgccaggccccagtgcgaaccgataaggcgggtcaccatacccggatgggcaaagtgctggataccgcgctggcgatcgctttgccccgcggcatgcagtagcgtcaggtcacgcggttcgcccgcggtcagaaagcgcgcttcgatggcgcttaaaatggactccgccgcgccgataagcgtcatcccgacggtgcagacggtgtcgccgctggcaacccaccgcgccgcctcatgggcgtcgataaatttgctgctcactttttatcctccgttgatagcgtgatgatggattctgcgagacgcgttttgagctgctgtttactcactttgccgttgtgggtacgcggtaaagcacgggtgaaaataatgcgcgccggtagcttaaagcgggcgattttgaccttgagccagtcgaggatctcttcgctggtcaggtgatgctggccatccggcacgataaacgccacgggctcttcgccgtagaccgggctgggggtcgggatgacggcaacttcccgtactccccgataggtagagagaatgttttccagctccagtgagtaaattttctcgccgccgcgattgatcatgtccttgctgcggtctttgatgtacagccagccttcgtcgtcgagatagcccagatcgccggtacaaaaccagccctgcgcatcgcagctcgggcgtcgctcgctgtgctgccagtattcgcggatcaccacatcgccttttagccagatatggccgatttgcccggcggggaggggctgctggcgatcgttgcggatggtaatggcgagacccgggatcgcctgacctgaactgccacatttatcgctgccccagacgtcgcccggaaaaatcgtcgcaggcgaggtcgtttcggtgaggccgtagatcggctgaatcgcggtatgcgggaacagggtttttaactccttgatcagtccatcgctcaggtggcccgcgccgcaggcaatcgtgcgcaatgccggaaaatcgccgggatggctggcgctctgctcacgcgcagcctgacaaagaaggataaaaatggtgggcgagccgtgcagaaaggtaatgttctgctcgcgcagggtggtgatcacctgcggggcattgaaccgatgctgcagccagatgctcgcgccgaggctaataaacagcgccagcagcgccgacaggccggtgatgtgatagataggcaccgccagaatggtgctatccgcggcggtgagattcagtttttgcgtataggcgtcaatcgcgcagagcaggttattgtgggtgataatcgcccctttaggctctccggtggtgccggaggtgaacatcatcaccgccgtatcgtcgcggttaaccgggaccggcgggcgggtcagcggttcgggaaggcagagcgcctgccattcgctgagtgaaaccgcacgcgcgtcgggggtgtttttcagccagtcctgcacggtcgcatcgaacaggacaacccggggagcgatatggcctaccagcgcctcgctttcggcctgcttaagcttggtgctgaacggcaccacttcgatgcccaaacccagcgcggcaaaaaggacttcgcaaaaagcggggtgattgccccaggccagcagaatacggtcgcctttgcgcagcgaccagccgcgatcaagctgcgccatcgcccgctgtacccgcagatgaaaatcgcggtacagatagcgccgatcctcaaacgccagcgccagggcatccgggctgcgggcggcgctgtggctcagggcctggtacagattctggaagtcggcggaggtgctgttcatgtgtctctcctgatatcgcgtattgagtaggagtagtcaggggaaattcaggagaggaaattgccgaatggctcacaatagaaaatcaacaaaacagaagcaattttgtaacattgcacaatgggcaggagagaccgggtgggggagagatatccgcgaatcaaaccgacgtgaataatgccagaggacgctatcttttagacccgtgttaaccgggcctaaaagagtgaaggggtcagccctgccgcttagcgtttacaggcatcgaactcgagccgttcgccatcggggccgcgaataagcaggaagcgcacgttgtcttcttctatcggcccttcatcgagcggataaccgagcgccgccagccgctgctgcaccgcatccaggtcgctgacttccagcgccagatgatcgataccgcagcgaggggcgtcaaagggcgttccagcgggaagctgatacagctcgaggacggcgcccgccatttccaggaacgcaacttcaatagtgccctgtggcgatggcttgctaaaccgctgctggcgctgaaagcccagcggttcatagaaggcaagcgaacgcgttaagtcactgacctgatagccaatatgagcaatcgtgttgataagttcgcgcatgttatacccccttacgcacgcaccagaagccgtagaaagcgacatacacaaagcacaggagcggagcgataaaggcgatttgcatattgccgccgttcatatccgagataatgcccatcaccagaggaattacggccccgccgataatcgacatcaccacgatcgagcctgcggtctgggtatctttccccatccctttgatcaccagaccaaagttcgtcggccagcatggcgccatacagaagctgaccagaatgagcgcatagaccgccagcattgaaccgctgaaaacggcaatcagtaacagggcggtggcggccagggcaaacgttccgagcagcatcgccggattcagacggttcatcaaccaggtggccacggtttttcccacggcgtaaatcaccagagaagccagcagccagtaagtcgcggagtgctcgctggtgccttgctgcacgagctgcacaaagcgaatcgtgaagctccatacgccaacctgggcgccgacgtacaaaaactgcgacaggatcccgaggcgaaagcgcgggatagcaaacaggcgtttcagcgttggccccatgctttccgtcgggagttgctgttgttgagcgggcgcgcccttgcacgacgggaatttaataaacacgaacaccagcgccagcaccaccagtacggagccgataatcagatagggcccgaccacctgaccaaccatctgatggcgtgcaacgtctgcagcggcggcgggcatcgccagcagttgttcatgactcggatcgttttcgccaaagaccatcagctggccaattaatacgccggagatcacgcccagcgagttgaagatctgcgaaaagttaatacgctgggtggaggattgaatcggacccagcaggctggagtaggtgtttgccgacgtttccagaaaagagagtccgcaggcgatcactccgaggcaggcgaggaatgcgccgtaggtcatgatctgtgcggccggaacgaacaggaagcagccgagggcgtaca

SEQ ID NO: 284 - DNA, 163335 bp, Klebsiella pneumoniae
  modified_base (12461)..(12764): a, c, t, g, unknown or other
  modified_base (12894)..(12963): a, c, t, g, unknown or other
  modified_base (41951)..(41951): a, c, t, g, unknown or other
  modified_base (43542)..(43664): a, c, t, g, unknown or other
  modified_base (85268)..(85285): a, c, t, g, unknown or other
  modified_base (86588)..(86690): a, c, t, g, unknown or other
  modified_base (87768)..(88140): a, c, t, g, unknown or other
  modified_base (90046)..(90073): a, c, t, g, unknown or other
  modified_base (114368)..(114368): a, c, t, g, unknown or other
  modified_base (122089)..(122109): a, c, t, g, unknown or other
  modified_base (122308)..(122350): a, c, t, g, unknown or other
gtcattagcctgtcatgcagcaaacagaagccattcgatataattagtgcaacttatcaggaaggctggattgcttcatcaatacccggcgtcagagtacgccaggaaatgaatatccagccctcttccggagaaataaacgctgccgaacttgtttcagttatggaactgaaaacaccggttgtacttccccggacatcactaattcagaaatggagagttatcatgaaaaatatcgtattagcatctttgctgggctttggtttaatttcatcggcctgggccactgaaaccgtgaatatccatgatcgcgtcaacaatgcacaggctcctgctcaccagatgcagtctgctgaggctcctgtcgggatccaggggactgctcctcgtatgaccggtatggaccagcatgaacaggccattattgctcatgaaaccatgacgaacggctcggcggatgctcaccagaaaatggtggaaagtcatcagaagatgatgggaaataacacggtatccacgaccgtcccgtcaacgtcttacgcggcgatgaatgagcatgaaagagcagcggttgctcatgaattcatgaataacgggcaatccggcccacatcaggccatggccgaagcgcaccgccgcatgatcaatgcaggctgaatgcgacggtagtatccgtgctgttaccttttccctgatagattttcctgaaacaacgttgctacatttttgccccccgtcagggggcttttttgtctgactcagctacacttaaccggtacctgtctgaaaggaattattatatgggctatttgcattctagggttggaattcatccattctaacccttgattcttagtcggacaaaaagctgcttctggttggatttttctgtttttcaccaccctgcgaaaatctaacattggttggattctcagacgcgccctctctcgcgttaatccaactctccaccttctgcctgcttcaacaatgtcggaatgtgcggtccatactcgaccttgcctcgtcctgctcgaataccactgccaaccttgcgggcttctttggagtacaacgtctttgcacggatgatctcatagctataaccccgacctaaccggttggacatcttgatcaaaccgttgagcccttcggtatagccattggtgagtgagaacggcgcatcccagtaggcaaagatgtcgtcgtaatggttgtgtaccgtttttaccagttttttgaaaggctccatgccataaggcggcaggctgttcttccaagcctcaaaggcgttctgagcactctgcttgtcgggttcgtcgtagatgcagaagaaggcttccttgaagtcataggccatggcaagtgctgggatcgcctgctttacaacctccagcgccttttgctctgcgggcgtcaggttgccgggtcgcttcagggtaagccagcgaatggactttttgacgtaaatgcgatcttctttgcttaactgtgcctgggtaatgaccccaacttactgatagtgttttatgttcagataatgcccgatgaccttgtcatgcagctccaccgattttgagaacgacagtgacttccgtcccagccttgccagatgttgtcgcagattcaggttatgtcgctcaatgcgctgagtgtaacgcttgctgttaacgtgcagctttcccttcaggcgtgattcatacagcggccagccatccgtcatccataccacgacctcaaaggccgacagcaggctcagaagacgctccagtgtggccagagtgcgttcaccgaagacgtgcgccacaaccgtcctccgtatcctgtcatacgcgtaaaacagccagcgctgacgtgatttagcaccgacgtagccccactgttcgtccatttcagcgcagacaatcacatcactgcccggttgtatgcgcgaggttaccgactgcggcctgagttttttaagtgacgtaaaaccgtgttgaggccaacgcccataatgatgtagccccctgaaacaccggacagtagctgtatctccagataagagataggcttgaatatatgtctaacactaacgccaattttgagatgaccgggatcctgttagggcaagaagcccgtaaacgtaaaactcctcaggagaagatcgccattatccagcagacgatggagccgggcatgaatgtctcccatgtcgcccgcctgcatggtatccagcccagcctgctgtttaagtggaagaagcaatatcaggaaggcagcctcaccgccgttgcggccggagaggaagtcgttcctgcttctgagcttactgctgctctgaagcaggtccgggaacttcagcgccttctgggcaagaagacgatggaagttgagatcctgaaagaagccgtggagtacggccagtcgcgaaaatggatagcgcacgcgcccttgttgccaaaggacggggaatagccctggtcagccgcaccatgggcgtgtcgcgtgcgcagctgtcactgcggattaaccgttctgccgactggcaggacaagcgctgtaaccggcgtaatgacgaagcagacgaagaaatactgtcggctatcctcgacatcatcagcgatatgccgagttatggttatcgacgcgtgtggggcatcctgcgcaagcaacgtcgcacagagggacagccacctgtgaacgccaaacggctttacaggataatgagcgagcataacctgttgttgttgcatgacaaaccagagcgaccgaagcgtgaacataagggcaagatagcggtggcagaaagcgatatgcgctggtgttcagatggcttcgagttcggctgcgacaacggcgaaaaactgcgggtaacgttcgcgctggactgctgcgaccgtgaggccatagactgggcagcaagcacgggaggctatgacagttcaaccgtgcaggatgtgatgctgaggtcggtggaaaagcgcttcggcgacaggttgcccgatacagcggtgcagtggctgacggacaacggttcagcgtataccgcgtatgaaacgtggaggttcgcgagagagctgaatctggagccctgcacaacagcggtgagcagcccgcagagtaatggcatggccgaacggttcgtgaaaacgatgaaagaagactatatcgcgttcatgccaaaaccggatgtgagaacagcactgcgaaaccttgcagtagcgttcacgcattacaatgaaaaccacccgcacagcgcgctgggatatcactccccgagggaataccggcggcagcggacatcgttaacttaagatacaaaagctgttcggagatggagggtcaagatcactagactggcccctgaatctccagacaaccaatatcacttaaataagtgatagtcttaatactagtttttagaccagtcattggagaacagatgattggtaatgctgccaacttactgatttagtgtatgatggtgattttaaggtgcttgcgtggcttccatttccatcagatgtccttcctgctccgctactgaaggcgtggtgcgtaacggcaaaagcactgccggacatcagcgctatctctgctctcattgccgtaaaacatggcaactacagttcacttacaccgcctctcagcccggcacgcaccagaaaatcattgatatggccatgaatggcgtcggatgtcgcgccagtgcacgcattatgggcgttggcctcaacacggttttacgtcacttaaaaaactcaggccgcagtcggtaacctcgcgcatacaaccgggcagtgatgtgattgtctgcgctgaaatggacgaacagtggggctacgtcggtgctaaatcacgtcagcgctggctgttttacgcgtatgacaggatacggaggacggttgtggcgcacgtcttcggtgaacgcactctggccacactggagcgtcttctgagcctgctgtcggcctttgaggtcgtggtatggatgacggatggctggccgctgtatgaatcccgcctgaagggaaagctgcacgttatcagcaagcgttacactcagcgcattgagcgacataacctgaatctgcgacaacatctggcaaggctgggacggaagtcactgtcgttctcaaaatcggtggagctgtatgacaaggtcatcgggcattatctgaacataaaacactatcagtaagttggagtcattaccgaatatcggatgatttgtatcggaactcattacaccatgcgttccgattaacgccgcatagccagttgaactttgctactctgtgaaaggtagtaccgtctatccagtgcggatttaattaatggaataaatgattatgagtgataatgatacaatcccgaagaagtctacaagccagattaacaaagcggtattctttacatctgctttgctaattttccttcttgtcgcctttgccgccgtattcccggatgtcgccgacaaaaattttaaactactacagcaacaaatcttcacgaatgccagctggttctacatccttgctgtggccctgattttactaagtgtcacgttccttggactctcacgctacggtgatatcaagctgggcccggaccatgcgcagcctgatttcagctaccattcctggtttgcgatgcttttttcggcagggatggggatcggcctgatgttctttggcgttgccgaacctgtaatgcattatctttcgcctcccgttggcacgccagaaaccgttgcggcagccaaggaagcaatgcgtctgaccttcttccactggggactgcacgcatgggcaatttatgccattgtggcgctgattctggcgttcttcagttaccgtcacggtctgcctttaactctgcgctccgcactctatcccattattggcgatcgcatatacgggcctgtaggccatgcggttgatattttcgctgttataggcacggtctttggcgtcgcgacatcgctgggttacggcgttttgcaggtgaatgccggtttgaaccatcttttcggggtgcccatcaatgaaacggtgcaggttattctgatcgtggtcatcacggggttagcgacgatttcagtggtgtccggcctggataagggaatacgtatcctgtctgagctcaatctgggtctggcgttgttgctcctggcgctggtcctgtgtctgggaccaaccgtgcttctgctgaagtcatttgtggaaaatacgggcggttatctttcggaactggtgagtaaaacgttcaacctttacgcgtatgagcctaagtcgagcaaatggctggggggctggacattactgtactggggatggtggctttcatggtcgccgtttgtggggatgttcatcgcacgggtctcccgcgggcgaaccattcgcgagtttgtcaccggcgtgctgtttgttcccgcgggttttacgctaatgtggatgacagtgtttggtaacagcgcgatctatctcattatgaaccagggggccacagacctcgccaatactgttcagcaggatgtggcgctggccctgtttaatttcctggagcatttcccgttctcttccgtgctgtcattcatcgcaatggcgatggtcatcgtcttctttgtcacgtctgctgactcgggggcaatggtagttgatactctggcaacaggtggagtggcaaacacacccgtctggcagcgaatattttgggcctcgctcatgggcattgtcgcaattgcgcttctccttgccggagggctaagtgcgctgcaaacagtgacaatagcgagtgcattgcctttctcagtgatcttactgatatccatatacggacttttaaaagctttgcgccgggatttgaccaagcgtgaaagcctgagcatggcgacaattgctcctacggctgcacgtaacccaattccctggcagagaaggttacgcaatatcgcgtatctgccgaagcgatctcttgtgaaacgttttatggacgacgtcatccagcccgccatgacgctggttcaggaagagctgaacaagcaggggacgataagccacatcagtgacgcagtcgaggatcgtattcgtcttgaagtcgatttgggtaacgagctgaattttatatatgaagtgaggcttcgcgggtatagctcaccgaccttcgcgctcgccgcgatggataataatgagcagcagactgaacaacatagatattatcgcgctgaggtatatctcaaagaaggcggtcaaaattatgatgtgatgggctggaaccaggagcagctgattaatgacatactggaccagtacgaaaaacatctgcacttcctgcacctcgttcgttaatagcaacatgccgtcctgggggcggcaattatttatcccggccgcaatatgaggaatgcagaatgatttcacgctggaaatggattctgaagcagacagttaaaaagctatggttcagggcaacgttattcgccattgtcgcgataataacggcccttttatcaattctttttaaatcaatgatacctgagtcggtttccgtgaaggttggtgcggaagcagtcgataacattctgaacatactggcatcgagtatgctggcagtgaccactttttcgttgagtatcatggtcacagcctacggttcagccactactaatgtgactcccagagctacgcgtttagttgttgaagacgtaaccacacaaaatgtactggccaccttcatcggttcttttctcttcagtctggtagggattattgccctcagtatgggagcttatggagaaagggggagagtcattttattcattgtcacactggttgtcattgccttaatcctcatcacattgcttcgctggatacagcatttgacctctctgggaagggtaggtgagacaacggcaaaagtagaacaggcggccatcgaaacatttattgcgagagcaagaaatccctgtctcggcggatatccatggcttgagaacaatgaacagccgaaaggaacggttgcagtttatccgaagaagattggctatgttgaatatattaatatggtgaaacttagcaagctgctgaccaatgatccccgtcatgtatacctcgtggcgcagccaggcagtttcatccatccatccatgcccgttttgtacctgagtcaaggccaggagtcatcaatcagcgccgatttacttgagacgattattgtctcggatgtacgttcatttgctcaggatccccgattttgtcttagcgtcatggccgaaatagcctgccgggcactttcccccgcagtgaacgatcctggaaccgccattgatgtcattggcagaggtgttcgtatactttccacttacgcgcagaataaatctgatgaaatagaagtgaaatatccttcagttcatgttgcaccacttcagaataacgatctactggaagactttttctcacctgtcgcgcgcgatggtgccggtatgagggagatacagataagagtccttaaaggactgtctatgctgagtaagggttggcctgggatattttctgaggccgcgcataatttagcatttgaaacattagagcatgcaatacgtgctgaccatatagattctgacagatgtctaataaaatcaatttattataatttatttagtggtgaagactctaataaaaaaccatagttgtggggaaagtaattaggccgcaggaaagataatggcaaaaaaaattccgagaatgggcgtcagttttgtggcatatgcgggcgtgttaattgcgagatgtattaacctatggagagcagttccatctatactcctgtcagcccatgctggaaatattgttatcactagtcctatcacggaaaagttaattgtatattctaaccctacgcagtattccgcttaatggcttgcttctttgtgtcttttcccaacagtatccgacaataaaaagtacgtgaagtaaacccaacaaaataacgctgtactgtatggtcagtcaatgtattagattaacagctttcgggtatttttctagtgctttgaaaaaaggaatatcagacatttgaaggaattcaggatgtcaacaccagttgctttagagaaaaatggaaacggcttcctattcactagatgcaatagatagcggtcctcgttatctgctgaagcaaatattggaattgcattcaaccctcaacgacttctgattttcaagacagtgtctacttgtacataacacatatctgcagcactgtgctgaattagggccagatggcactccagccccctgaggtagggacacatcttcaaagattccaggttttttctactactttcatcaatgccatctctggaaggcgctgagtagttatccgcagcaaccagcagagttatgttgcagacgaataatgctgtctaccggatactggcagccccgactcctctgtactatgagacaaagctcgctcatctcagtaaatattacattcgctgttccgtgttttgcatcaaatcacatcctggtttctctgttatttaagcagttcagaacgacttttcagtaacgctttcccctgcgccagcagcaggtgattacactgcccttcaatttctaccagctgatcggcaagcaattgctgagtgtttgcgctgaaagtgccggtcagttcaattcccggatggtaagttttctcgcttcttccagcggaagcgctctggagtaataccagccctgagcataactctgtggccagaacgtcttcagatagttcacctgctcctgagtctctacaccctcaaacacaatcttatctgcaatggagcggaacatctcatgcagtccgggaagaagatcatatcgtaaagattcagtaccaatagcactagttagcgatttgtctatttttatttcatctacatcaagcgcagttaccagattaagattagaatatcctgtcccaaagtcatcgatggcaaacctgacaccatgatttttatatttatcaatgtgaattttcataccttcaaaatcccctccttgacgctccgtaatttcaagaaggattgttttatatgggatgttatattcagaaattaatcctagtagtttatccctgaatttttctgaatcaagatcgcttggattaatgtttacgctcaaaaatatttcattctgaatagcagtatggataaattctcggatagcatggttaatgacgaataaagtcacatcctcctgcaacccttccctttcagaaagcggtataaatacttcagggctaatattcccgagtctttcatctttccatctgagcaaggcctcaaatccgcagatctgtccgtcttcaattctgtaaataggttgatagaccagcgacaggacttcatttttcaaagcctttacaaaccttgcagatagtgaactatkgagttctgctctgttcataatgataatataaatcattaaaccggaaagtagtgacactgttactaataacatttgtatgctccagtgctctgaaaatatccccgtaaaatacccacctcctgcaacacagagatcataatgtaggctacatgccctaaacactctaaaccttagtggaacgctatcatgccgatcaagaagaggagcatcaggtcctatattgaagtaatgcctgtcatgcttactatttccgacaacagcgctaaagttttttgaatacatatcagtttcgaatcgtctgaagacaaatggtgatagggtcaccataataccttcagaaatatatccattgacggatatatcatccataagcttaataccaaaaagccacactccttcccgcgaagtccattttttatcaaaatgttccagacttaaggtgggacgtaaactcccccacagagcactacaggctaattctccttttatgatgtagccaacatctttaatcaacggatagggccatactacaacccgaagatgtaggatattttcattagtacatggactgtctcctatattcaaatgtgactttgcagcagtcttgacagattcagtctgaaccaggagcgattcagagcgaactgatgtagccccctgaaacaccggacagtagctgtatctccagataagagataggcttgaatatatgtctaacactaacgccaattttgagatgaccgggatcctgttagggcaagaagcccgtaaacgtaaaactcctcaggagaagatcgccattatccagcagacgatggagccgggcatgaatgtctcccatgtcgcccgcctgcatggtatccagcccagcctgctgtttaagtggaagaagcaatatcaggaaggcagcctcaccgccgttgcggccggagaggaagtcgttcctgcttctgagcttactgctgctctgaagcaggtccgggaacttcagcgccttctgggcaagaagacgatggaagttgagatcctgaaagaagccgtggagtacggccagtcgcgaaaatggatagcgcacgcgcccttgttgccaaaggacggggaatagccctggtcagccgcaccatgggcgtgtcgcgtgcgcagctgtcactgcggattaaccgttctgccgactggcaggacaagcgctgtaaccggcgtaatgacgaagcagacgaagaaatactgtcggctatcctcgacatcatcagcgatatgccgagttatggttatcgacgcgtgtggggcatcctgcgcaagcaacgtcgcacagagggacagccacctgtgaacgccaaacggctttacaggataatgagcgagcataacctgttgttgttgcatgacaaaccagagcgaccgaagcgtgaacataagggcaagatagcggtggcagaaagcgatatgcgctggtgttcagatggcttcgagttcggctgcgacaacggcgaaaaactgcgggtaacgttcgcgctggactgctgcgaccgtgaggccatagactgggcagcaagcacgggaggctatgacagttcaaccgtgcaggatgtgatgctgaggtcggtggaaaagcgcttcggcgacaggttgcccgatacagcggtgcagtggctgacggacaacggttcagcgtataccgcgtatgaaacgtggaggttcgcgagagagctgaatctggagccctgcacaacagcggtgagcagcccgcagagtaatggcatggccgaacggttcgtgaaaacgatgaaagaagactatatcgcgttcatgccaaaaccggatgtgagaacagcactgcgaaaccttgcagtagcgttcacgcattacaatgaaaaccacccgcacagcgcgctgggatatcactccccgagggaataccggcggcagcggacatcgttaacttaagatacaaaagctgttcggagatggagggtcaagatcagcgattcagagcgaacaagcacatcggaagtatagtctttaattttatcccgaaaaatcaggtaagatacgctctcagataatacaaaaaaaatataccagctgaaagaatcgataaagagaggactgatagattatgtatccactttccagggctaatcaaacgttccagcttacgactaaccatgcagatctcccctcaaattgaaaagatataaagctatattttcgccaacttcactgaccgattagctggcactgaacatactattccagtatacctattcttgccttactcatcccgggtatgaatcaaataatgtgacatggttcggatagatactggttatgatttacagagataattcatgcgttattaatagcctcgtgaaggctccagatgcatggtgcaacttttaagcgatgcatgtaatgcggttttttacccactagtatagaacgaatattcatttcttgctgggcgatcgcacactaaggtgtacaccaaaataaagacactcttttttgaaaaaaaaagagtaaaatgttgtgtgacatcggcattacaaaacgaaaattcatgttataatcgggttattattgataatgttacgcattgcaacgtgtaaccggatatctgcatttgggtgaagatagcttaagatggataaaaaatatgatttttcgctcagttatgaagccttaacacgggtatgtgaaaatgcaatatgtgaacatattcgcagagcaggttctctggaagggttaggtttcgcacttgaatatacaaaggcctatgctatcctggaagtatggtctctgctggcagctgctggcgatacatttccagctctcattgagaaagacagaatatatctgttgcaactaatttccgggaaaaataatatagagctacattaaatcataaattatttggcagaacatctccgtttttacttaacgcccgccggaatcactgacgtgaggaaaatgaaatttgttgtgcaataataattctgattattctggtcagtcggattggccgtagagtttcagtattcttgnnnnnnnnnnnnnnnnnnnnnnnnnnnnnnnnnnnnnnnnnnnnnnnnnnnnnnnnnnnnnnnnnnnnnnnnnnnnnnnnnnnnnnnnnnnnnnnnnnnnnnnnnnnnnnnnnnnnnnnnnnnnnnnnnnnnnnnnnnnnnnnnnnnnnnnnnnnnnnnnnnnnnnnnnnnnnnnnnnnnnnnnnnnnnnnnnnnnnnnnnnnnnnnnnnnnnnnnnnnnnnnnnnnnnnnnnnnnnnnnnnnnnnnnnnnnnnnnnnnnnnnnnnnnnnnnnnnnnnnnnnnnnnnnnnnnnnnnnnnnnnnntaataaaaccagcgaaatagacaaaacaacatacaataacataaaaatacctgtgttaacaattaaaaaaggagattaggtcgagtccgtgagtgattttaacatatacgcgaattgatacaactcatannnnnnnnnnnnnnnnnnnnnnnnnnnnnnnnnnnnnnnnnnnnnnnnnnnnnnnnnnnnnnnnnnnnnnagtctcccccgtagcgggttgtgttttcaggcaatacgcacgctttcaggcatacctgctttcgtcattttgttcagcgctcgtaccagggccatagcctccgcaacctgaccatcgtagtcacgcagcgtcagtgaacccccgaacagctgttttacccggtacatcgccgtttccgctatcgagcgacggttgtaatctgttgtccatttccaccgcgcattactcccggtcatttgctgattagccactgcacggttacggtctgcatattcaccgggccagtaacccgcaccttttcggggtgggataagcgcgctgattttcttacgccgcagttcatcgtgacagagccgggtgtcgtaagcgccgtctgccgatgctgccctgatttttctgtgagtctgccggataagacccgggaaggcttctgagtccgtcacattgttcagcgacaggtcagcgcagatgatttcatgtgttttactgtcaacggcgagatgcagcttacgccagatacggcggcgttcctggccatgctttttgactttccactcgccttcaccgaagaccttcagcccggtggaatcaattaccaggtgtgcgatttcaccccgggtgggcgttttgaaactgacattaaccgactttgcctgcctgctgacacagctgtaatccgggcagcgtagcggaacgttcatcagagaaaaaatggaatcaataaagccctgcgcagcgcgcagggtcagcctgaatacgcgtttaatgaccagcacagtcgtgatggcaaggtcagaatagcgctgaggtctgcctcgtgaagaaggtgttgctgactcataccaggcctgaatagcttcatcatccagccagaaagttatggagccacggttgatgagggctttattgtaggtgggccagttggtgattttgaacttttgctttgccacggaacggtctgcgttgtcgggaagatacgtgatctgatccttcaactcagcaaaagttcgatttattcaacaaagccattttgggactggatattcctctctcaactatctaagagaatttccatttgatgcgattaagttagacagaacattcattagtggtattgcccacgttgcacgggacttatctattgtaagaagcatagtgtctcttggaaaagctttcagtttaggtatagtcgcagaaggtgtggaaaataatgaacagtttgaattgctaaaaaatatgaattgcgatgaatttcaaggttattattattcgaagcctttgtcaggtgatcaactgattgattttttgaggggccaaaaaaaatagggctgtatgtcctattttttcatatactatcgttttccctttttaatttcatacattctttcgtctgcatcctgcatgatagcagagcattcagtatgaatttcctcatcatattcaataatccctgcagaaaaatctatgttgtattttttttgagaattaagattgtagctggtaatcccggccctcaatttatgaaggaattcttctgcttctttataggttgactcgggtaatagaacaccaaattcatcacctcctaatcttgcaacaacgctttttgaactactaagatcttccagcatatctgcaaaattgcaaagtacttcattaccttctgaatgaccgaagttatcattgattggtttaaaattatcgagatctatgatcagaacacagaatgtttttttcttttttttggcttttcttaacgattcatccgtcattagggcgaaagaacgccggttacatatacctgtcaaaggatcagtagttgcttcgtttattattctaaactcatcctctacgatttctgctaaatctttaagcaataagaagtcatctctggttaatactcttggttctgtatcaataatacatattgttccagctatctcaccatctggcagtcttacgggatgccctgcataaaaccggatataaggatcatttttaactaatttattttctttgaatcttggatcaaggcttgcatcgggcactattaatggttcactaagatctactgctattgtacaaaatgaatcacttctatctgtctcttttatcttcagcccataacatgacttaaaccattgcctgtctctatcaattaatgaaacaagtgctattggtacatcaaagagtttggtggcaatcctcgtcaatctgtcaaatcgttcttcatattttgtatcaaggatccccatagaatataatgataataacctgttctcttctttatggtttgtcataattttcatcttgagtggttattgcagggtagtgttggttatcgctatcttatcagaattgtcctggaactcaataatcccaatatctcataatcatataaaacttaacaagtttccaataaatcatgatgaatagtgaactgttacatctaatcatctgtgacctgaagcgctcattatacacttccatgtattcagaatgcataatgatttgtatattaaaaatcgccataacttacaatgacttattttttgtggcacaattaaagcgcatctgttcaaataaatgtaaagacattaatgcttgatcttcatggtttcttatgaaaaccagtggctgaagaaacgtatggcagttctgaatctgaacaagacgagacggcatgaaaggttcaagaaaattgtccaggaaggtacatagtttccttatccaatattttctactgagggtatattgtatcagcttaagacaggaactgttgatacagaacagaaaagttcaacacagcctgaatctgcgcgacgctaaattttttccttctggcgaaccaacaaacagcccgtttatagagagattctgcagacgacaaaaggattaatccctgaaattgcactgaattgtcacctgaagatgtgcaggacaagccagattactcttacaagggataccatcgtaatttagcaaaaacacctaagacctaaacgacagctaagtacatagtgccggacggatcatgattttttatttaacttacggacttcatttttcagcaattatcttttctcttctgttgtaaacttatgaaagcgttacgcgaaatcccgcaaggttacaggggtgtaccaggccggaaatcgcgtagcgctctcttctcttctgtttcctgcctaacatgtacatcctggcattactccaattctcccaaaaaccgtaaaacagccatcaacccgcgtcattactggcttcatggaggatctgagcagaaaaaggatcctttacgtatttggttttacccgcaataatgcgggataagacaacaaaaggatccgcgcgctgcgatttattgtcatggcaggatcggcccgtcaggtgcaaaatacctgtatccataaacagtgcgtgcgctacgtgaaaaataactcatgaacagcatcattcccctgcagaattcaccagaacgcgtctccctgctgccgatcgccccgggcgttgattttgcgaccgcggtggcactccggcggatggccacctcaacaggtgccacgccggcttacctcctggcgccggaagtgagcgccctcctctggtatatgcctgaccagcgtcaccacatgttgttcgccaccatgtggaataccgggatccgtatcggtgaagcccggacgctcaccccggaatcgttcgacctggatggtctgcgcccgtttgttagggtgctgtcggagaaagtgcgcgcgcggcgcgggcggccaccaaaagatgaagtgcgactggtgccgctgacggatgccagttttgtgcgtcagatggaaagctggatggtcaccacccgcccccgccggcgtgagccgttatggccggtcacggatgagacaatgcgcaactggctgaaacaggcggtgaagcgggctgaagctgacggcgtgcatttttcgatccccgtgacgccgcatactttccgtcacagctatattatgcacatgctttatcaccggcagcccaggaaggtcatccaggcactggccgggcataaggatccgcgctcgatggaagtctatacccgggtatttgcgctggacatggctgccaccctggccgttccctttaccggtgacggtcgcgatgccgcggagatccttcgctccctgcccccggccggctgagattggcacgcctggcatgacgtcctgtattccgctaatacggaatacaggagcagagcgcattcagccccctccctgctccagcacaccagtccatcatgctgatgactgaaccgccgtggtcttacccggtgacctgcaatcctgcaggcatcaacataccgcagacaagacagggcacaatgcaggcattctggccgtgcatcccacggtgcgttatttcctgaaagctcagcgaatcatcccgttaactgcgacagtcattgaccatctgtggcccacatttttctgccatccggctcccgtttcctgatcgcatttagcagcgtgaagctggcgccgggttatacaaacagctgcagtctcatcctgccgggctaaatctgcagtacacaggggaacggataccatcaggtaacatgaccgtctcagcatccgattgagatcttcgtaaggggtatagagctttactgaaaaattgactgtggcatgttatcacccatgaaatagtgaacagaccagggaatacccccgttaaacccgcatgccgtagtcaatatctgcgtatcaagacccgaaatcacatattacagtcaatattgttcgatccgggcagacatgatagagaataaatattgactgcggtatgcgtgatgcatatcacagtcaatggaatgtccttagcggcatacggcagtcatgatatgcatatcgcagtcaattttctggcttcatcgctgagagggcttcagccagtttaagaggatcgatgcccgcagccttcagcgccttaatgacttcgtcataattttgctctggcgccttctcttcttcctcattgcgcggaaccttcacagggccactgatgagtttggggttgcgataatgcacgctgaaataggtggctcggccacgtttaaactcggtgtaatccagataaccaatatcccgcagctgctccatcgccttacgcaccgtgtggttctgcgtatagacatttgaggtgagattcagccgctcacgcatccgtttcatggaaataggtgcaggattctggggaagactttcgatgtaggtataaagcgcctgggctgattccttgcgctgcagggcgtcaatggctttcagccgcagcagtacccttctgtccatgtggtaaagctcaaacagcttaggttcagccttgatctcaacgatatcctcgttgatgtcataataggctgactgcaccagatgggtggtccatcctttggtctcgctctggaacttcaacgtaaccgaggcgagtttaaacagggaattactgatgcgatcgcgcatttttttgtttgaacgacgggagtcaaatccgcacatcttaacgaattcgacgaacgacagttccagggtgtcactttttaccccatactccgacatggagcgaattatccccagccagactttaaaatccgtgtccatatcaagacgcgaaccggtgatcttaacgtcagtgtacccttcgcttttggcaatggacagctgtacaagctcctcagtcgcgtctgtaacgtttttccggttcgccttgctcttccctgttgatttcagagttgggacgaagagaccgagtctcatgagcgctactggctgcacggtactggtgctgttgacatccagcttaacaacttcgccggttgtcttatcaacttcctgaaggttcagaagtaagctgttattttcgctcgtcatcttgatcctcaacggttatccacaaaaggatgtagtaatacgtatcgcagtcaacggatatacatacctctgtaaataccgttgcatatcacagtattagattatgcatataacagtcaacattttacattccgcagtcgatccagacagacgttaaagccagttacagcgcatgctggagcgatccggggatctcttttggatctcactatgatctccttgggatcaattattggatcgagaccatgaataacccagatacaaggccggaagcgccataccagatatccagaaccctggcctgattttcctgaatacgctctggaagattgagatctacaggtacaacaatgaaacattgactgcggtatgctgagtcgtctttcctctttctcgacacagatgcggtaagcatcataccatagtcaatatattacataccgcagtcaatttcattataactggcttatccagagccatctttagcaacccgacgtacgtgcaatctgtgaattctgtgattttccgcttcctcgccgctttctcactccgtgagatcgcttactgcggcgagcggcagtgattaatattgactgcggtatgtactcttttgtaatcccctgcgttctttgcatcacccaatgcggttcactttgcactttttcgtgcactttgcgtttttattgttgctttgcaataaattccaagatttaataaaataatgcaaagtgaagattaaaggatgttcagtatgggactcatggatacactcaaccagtgcataagtgctggtcatgaaatgacgaaagcaatcgccattgcgcagtttaatgatgacagtccggaagcccggaaaataacccggcgctggaggattggtgaagcagctgatttagttggcgtgtcatctcaggctatcagggatgccgagaaagctggccggctgccgcaccctgatatggaaacccgtgggagagttgagcaacgcgttggttataccatcgagcaaatcaatcacatgcgggatgtatttggtacacgactgcgccgtgctgaagatgcgtttccgccggtgattggtgttgctgctcacaaaggtggtgtttacaaaacctcagtatccgttcacctggctcaggatcttgctctgaaaggactccgtgttctgcttgttgaaggcaatgacccacagggaactgcttctatgtatcacggatgggtgcccgatcttcatattcatgctgaggacactctcctgcccttttatcttggggaaaaggatgacgccagctacgctataaagcccacctgctggcctggccttgatatcatcccgtcctgtctggcactgcaccgcattgaaaccgagctgatggggaaatttgacgaaggcaaattacctgctgacccgcacctgatgctccgtctggccattgaaactatcgctcatgattatgacgtgatagttatcgacagtgcacccaaccttggtatcggtacgataaatgttgtatgcgctgctgatgtactgattgtccctactccggcagagcttttcgactacacctccgcactgcagtttttcgatatgctgcgtgacctgcttaagaacgtggatcttaaaggctttgagccagatgtccgtattctgcttactaaatacagtaataataacggctcgcagtccccgtggatggaagaacaaattcgggatgcctggggaagcatggtccttaaaaatgttgtgcgcgaaacggatgaagtcggtaaaggtcagatccgtatgagaaccgtttttgaacaggctattgatcaacgttcttcaactggcgcctggcgtaatgccctctctatatgggaacctgtttgcaatgagatttttgatcgtctgattaaaccacgctgggagattagataatgaagcgtgctcctgtcattccaagacataccacacatactcaatcgactgaagatacttcatcaccggcgccagccgcacctatggtggattcattaattgcgcgcgtgggtgctatggcccgaggtaatgctatctctcttccggtatgtggacgggaagtaaaatttacccttgaggtgctccggggagactctgttgagagcgcttcacgcgtatggtcaggcaatgagcgcgatcaggaactacttaccgaagatgctctggatgatctcattccttcatttttactgaccggtcagcagactccagctttcggccgccgggtttctgatgtcatagaaattgcagacggcagccgtcgccgtaaagccgcaatcctgacggaaagtgattatcgcgttctggttggtgaactggacgatgagcagatggctgcattgtcccgactgggtaacgattatcggccgacgagtgcttatgaacgtggcctgcgttatacaagccggctgcagaatgagtttgcaggaaatatttctgcgcttgccgatgcggaaaacatctctcgtaagatcattacccgctgtattaatacggccaaactgcctaaatccgttgttgccctgtttgcacatcctggagaactgtctgcccggtcaggtgaagcccttcagaaggcttttgcagataaagaagaattactgaagcagcaggctgagactctccacgatcagaagaaagcgggactaatctttgaagctgaagaggtcattagtcttttaacatccgtactgaaacaatctccctctccaagggttaatctgagctcacgtcatcagtttgctccaggggcaacagcattgtataagggcgataaaatggtgcttaatctggataggtcccgcattcctgtggagtgtatagagaaaatagaagccattcttaaggagcttgagaaaccaggagtctgatgcggacacgctttagtctacggttatctccctttacttcatttcctttctcacaggccagaaaacataactggcctaaatattctctctgagaccacggtcccacctgcatcgtcggtcaggttatctttctgggaccacggtcccacctgcgtcgtcggtcagcttagctgcctgggaccacggtcccacctgcgtcgtcggtcaggttatctttctgggaccacggtcccacctgcatcgtcggtcaggttatctttctgggaccacggtcccacctgcatcgtcggtcagcttagctgcctgggaccacggtcccacctgcatcgtcggtcaggttatctttctgggaccacggtcccacctgcgtcgtcggtcagcttagctgcctgggaccacggtcccacctgcatcattgtttaggtttccagcctgggaccacggtcccacctgcatcgttggtcaggttatcagcctgggaccatggttgcattgatgtcaatgacgaactgatttttgacatgattgcatcacgaagagcggaataatcttgcagcagaactgaaatatctggcgattgaatagtaatggatcgggattagagccgagtatactgagtacaatttgtcaaatttcgcagtgtattcggtttaatctcctccagtttttaaaggtcaattgctgccgctacgcgctgttcagaccttcgtccggcaagtaaccaatccaggctattttcacaacccagggtgaataacatcattccgtcatcagcatagccacatcatgcatttcgtcacactgtatgatctggggatttcagagacattacttatcacaggttatgcagatgaataagactcaatagattgtttatccacagtgacggggatatacatgtgggtagcttcttgaaagacttatgatgtaaatccagcctcttgactctcacattgccaatatatagctcgtgacctgctccccgttgattagtacaccccgatgttagtaatgtcttcataagccacatgaggacatccccatgaagaagcgtttttccgacgaacagatcatcagtattctccgcgaagccgaagctggggtacccgcccgtgaactctgccgcaagcatgccatttccgatgccacgttttacacctggcgtaagaagtatggcggtatggaggtgcctgaagttaagcgcctgaagtcgcttgaggaagagaacgccagactcaagaagctgcttgccgaagccatgctggataaagaggcgcttcaggtggctcttgggcgaaagtactgacgacagaccagaagcgggaagccgtgatgctgatgtgtgatgcgaccggtatgtcgcaacgtcgtgcctgcaggcttacaggtttatccctgtcgacctgccgctatgaggctcaccgtccggctgctgatgcgcatttatcagggcgcatcactgagctggcactggagcgcaggcgttttggctaccgtcgtatttggcagttgctgcgccgtgaagggcttcatgttaatcataagcgcgtgtaccggctttatcacctcagtggcctgggcgtaaaacgcagaagacgtcgtaaagtgctggcaacagaacgtctgccgctgctccgtccggcggcgcccaatctgacctggtcgatggatttcgtcatggacgcactttccaccggtcgcaggatcaagtgtcttacctgcgtcgatgatttcacaaaggaatgcctgacggtcactgttgcctttgggatttcaggcgttcaggtctcgcgtattctggacagcattgcactgtttcgaggctatccggcgacgataagaactgaccaggggccggagttcacttgccgtgcactggatcaatgggcctttgagcatggtgttgagttgcgcttaatccagccgggaagccaacgcagaacggatttattgagagctttaacggacgatttcgcgatgaatgcctgaatgagcactggttcagcgatatcgttcacgcaaggaaaatcattaatgactggcggcaggattataacgagtgtcgtccacattcagcactgaattatcagacgccatcagagtttgcagcacggtggcgaaatgtaaaatgtgaaggtaaacaaaccgaccttactaactgacggttgtatctaatcctgggggcaggtcactcgactaacttcataatggcgcgccaaaaattagtaaaaaattaccatatggctgtcattgaatttgtgaaggtgagtaccatgccgacatcggcaaaggtacaaaagagtagtattgttccaatgttagagctaaagcatgtctaaagtagcaattgctgggataatgctaaggcagcatcgtttcttgtttactcatataagtgcgtgtaaggaagtgaatatatcaagcccgggccatggcccggcaggatatatttgattacattgaagtgccctgcaatcatatctgacgccacaacttcctctatggattaagcccgaagactttctaataggcctctctgcgaggatgaaatttgtctacggatgaggggacagtacaacaagcaaacaggacctcatattactggctggaagccaagctttcttttaccgggtattgaattttgttttacagtatatgcaagcgctttaacgggatatcgtccgctttgtgaaaaaagcggaagtagctaatcacagtttgagtggagcaactgaatgaaggtcctgtttgttctgcgtaccagacacaatcactcagacagtggcttatttaaaatatgttaatgaaacctaagcaagagaactgaaatggacaaattgttaaatatgctgcgttataagagtgaggggtctgatattgacttcaaatctacccagtaccgctttaacaatggttctgagggtaatgactccaacttattgatagtgttttatgttcagataatgcccgatgactttgtcatgcagctccaccgattttgagaacgacagcgacttccgtcccagccgtgccaggtgctgcctcagattcaggttatgccgctcaattcgctgcgtatatcgcttgctgattacgtgcagctttcccttcaggcgggattcatacagcggccagccatccgtcatccatatcaccacgtcaaagggtgacagcaggctcataaaacgccccagcgtcggcatagtgcgttcaccgaatacgtgcgcaaaccgtcttccggagcctgtcatacgcgtaaaacagccagcgctggcgcgatttagccccgacatagccccactgttcgtccatttccgcgcagacgatgacgtcactgcccggctgtatgcgcgaggttaccgactgcggcctgagttttttaagtgacgtaaaatcgtgttgaggccaacgcccataatgcgggcggttgcccggcatccaacaccattcatggccatatcaatgattttctggtgcgtaccgggttgagaagcggtgtaagtgaactgcagttgccatgttttacggcagtgagagcagagatagcgctgatgtccggcggtgcttttgccgttacgcaccaccccgtcagtagctgaacaggagggacagctgatagaaacagaagccactggagcacctcaaaaacaccatcatacactaaatcagtaagttggcagcatcaccgaagatcgcgggcggaaacatccagatcaccgtcacctcagttcgcaatggaaacgtgaaattccagcacgttcaggtgcattatgagccgaacacgatctatggccatgcagactttactgcgaacctctctaaagcccagcaaacgacgctgcggcagctctatgacggctgcaacccgcgcccgaggcgcgacctactgcgtggtggagccgatcgcctgcaagtcggggcgatggagtttcagtgctcccctgaagagctattgtcgggattgattgaaacgatctacgctatgcgaaacgccctactacacggcgaagtagaccccgacccgagggtactgtcttgctatgagccagcttatcggatcgtaatgctgtttctaggctgcgtgagataagcaggagatgtaccctgtgttcatattttttagatatggcattagtcatggcattgatattttatttgatatttaatctaagtaaattaatatgatatataggcagttgataatagagtgggagtgaggctattatttagcctattgttttatttgatttagtgagtgccattgatgatatgactgcattatcaatggcattttttatggtttaaggccgacgctgaatcgaagatatagcaaataccatgtgaccgtatcagcaaatgccatggtatcgacaaccgggtgcattgcagcgctgtgctgatgccatcgatgctcgctttgatcagaaccgctctctcgacccttgccccagatcgttaaatatgcgccagaggagcacctcgtgatagaaattgtgaacaagacagccgccactcggaatcgaagtatccatataggtgaataaagtttgcggaaaatacgctgagaaaatagaaaagcgtcaatgaagggacataggaatggcgattaacggagagaacggtgttagtgcagtcaccgtggatgaactactcaagcaaggccttcggataccgaactatcaacgcccatacagttgggatgtatcgactgctctacaactggtggatgatatcagcgaagctcttcgagataccgaacgaaaagatattccctatgttttgggtgcaatcattcttcacgatgatggtgagtatctcaatgtagtcgacgggcagcagcgcctgctgactttgcgaatgattcttgcggccttagatccgataaatcatcaaatttcgatgtctggtaacagcgacactcctgtctccctagtttggatagagcttcaaaggcgcctgtcgcagttggaagataaaaaagagtttttggattttatctgtcacaaatgtcagttggtgcgtattgtgacggacgatattgatgaggcatttcgtgtctttgattcccagaactatcgcggcaaaccgcttgcccctcacgacttgctcaaagcacaccacctgcgcgaaatgcacgatgagtccgctgctatgaaagtggctgtcgttgaggcttgggaagccgtaaacgatgaggatctggacaggcttttttctacttttttataccggatatccaagtggtcacgaggcgaaagctcgctcgaatttactattcgggacatcggcatgttcaagggcatttcatcacgatcccacaggtcattttcgccaaatctgcgatatcaccttgcagcacaagccgctatgccacttctaagtgcatggtcggtatcctctacacatgatgcacgaaacgccgggcgcagccgctttcagcttgatgccccgataatcgcaggacgctcatttttcgagatggtgacattcatgcttgacgaattgaagatactggaacaagaggttattgacagaggtttcaaaaactttggcccatctcaaagtcgctaccgctacgtgtacgaattgttcattgccgcgctgctttgctatacaaacaagtttggcgatgaagatgtagatgaagtgcgaaataggttattcgcatgggcatatgccttgcgggtcgagttacttcgtgtgcaatttgtatctgctgacaaccgagcgcgaggtaaaaacgatgcaaataaatcgccttttgttttgctacgtaatgcgatgactggaagtgttgtccgcaaacttccaataacaagtaagccatacagcgataaccacgaaaaggaactcgttgcttttatcaaggggctgcaatgagcaagaaggagttgaaacctgaactgttaacagtaggcaagttattcactgacaattatctgattcctatttatcaacggaactatgcttggcgggccgaacagattgagcaacttattagcgatattcaagactcggtggtagggggccaggacaactattttcttgggaaccttgttgtaatcaagcggggtagagaggatgagttcgaggtcatagatggacaacaacgacttacaaccctctatctgcttcttaccttcctggagcaagacggtgagggtgagaagccgtcggttggccatgcaggccacttgcaatatgagtcgcgcgcacgggcaactgaggccctgctgcgagtagcacaggaggcggctaaggagcacgttcgaccgcagggctccacgagtaatgcagatgctggcattcatgaaggctacagcatcatcaatcagttcttcaaacaaaatgaaaaccttaatcgctcacgcgaaaaattctccgatttcttgctaacgaaggtgactgtcgtccgtgcctcgctgccacccaataccgacctcaatcgctacttcgagatcatgaacactcgtgggcagcaactcaagcaggttgatattgttaaggctcgcctgatgagcaaactgcccaatcaatatgaacgcgaatgctttgcgtgggtttgggattcctgtgctgacatggattcttatgtccagatgtctctgacccgtggtgacacaagtttgcgaaacaaagtatttggtgatgaatggtcctggctggaggtgaccagcttctcttcgctaatggaaagtcgtccgcaatccggcatcaattcatcaaggcaatcctccgaaggggtatcgttgtccttggatgaggcgttgtcaaaatacgctaaagagctcgagtcaaattccactgaagacgagggcaacgagcggtttcgttcgactattgagtttccggcctttctgctacacgttctaagaattatgaaaggcgatgaggtcgaagacgaaggcctgcttgacgacaagcgcctcatcaagtcatttgacgacgccgtaaataatgtacccgatgctaaagccgattgggtgcgtagttttgcatttatgcttctcaagtgccgcaacctcttcgatggcttcatcttgaagcgtcaattcacggcaaacatcggtgacgatggcgattggtctctccagcgactgaaaaaaggaggcggggacaagaagccaaccccgacgtacatccatgttttctcggccagcaatggaagcttagaggaggacgggagtgctgacccacatacccgagatgtattgctgcttcagtccatgcttcggattacctacacttctccgcgaacgatgcactggattaccaaagttcttcgctggctctccgttaaagcccctcgagacgtgaaacatgcggatcttgccgatttgttgaagggatatgcccgcagcaaggttaaagagacattctcctttgagaaagatcagcaaccacaagggtttggtatcagccgtatcgtcttttcgtatctcgactatcttctgttgagtgactcctcaaaacgagatttcaaatttcagttcagaacttccattgagcacttctatccacagcatcctgacaaagaacagtcgggcgcggttgtttcaggttctagccttaacctgcttggcaacctcgcgctcgtaagcgtcagcgcgaactcaaaattcagcaatagcctccccagagcaaaggccgaaaacttcaaggatacaattgaacttcaaagtcccaagctcaagagaatggcggaaatcacccgaaatacaaactgggacgatcagcagataacagcacatcatgaagcgatggtgacattgcttcgtgatgatgtaagtctggtggaggcaagcggaagatccaacccagggcgttgacttctttgaataactgcttttggatgaatatcctttgtggtgtgcaagttgtcagtctaaaagcgttttgcgtcgggcgacacgatcagtacagtctccaagttttcttaccatggtattttgtatggtatcgacatgcagatataattctattttattgattttatagtgttttaagacagcattgatcatcgagtgggtaacataggcttaatacattccttgctcctcgcaccggagcacatcacagatactgattgagatccacttcacgcagcggctggttttgacgttctgttatcatttgcactaggtctttttcgtccagctcatcgagcatttgttcatacagagccgcgggcacacaataaaaaacagggcggttgcggtcaataatcgcgaccgggtagccgccgccggcactggcggtggccaccggatcgtttttaagttcgctgatgctggcagtcacatcacacagaatgatatttgtcatggtccccccctgagacaagtcatctgtatgatcggtaaagtaagctcttgcggcaagtcccgtctgtcatttcgacggtcagaaacgggcaaccggcagctccttccagcgggtggtatatgccggtgacagcatctcccgtttcatctgccagtccggcgcaataccccgtccggcaaaccagactttcccgagtccggaatgattaatgccgtcgagtaccttcatcagcgcatcgctgtgcggccgtggctgcacgtcatcgaacagattcagctgcgcgacgccgttcggactgaaatcattgagcattatccccgcttttgcgtagcggtggccatcgagccagatcctgtccagagacctgaccgcagccgcgataatgtcccgggtgtcacgggtaggggtgtgcagtttttccgtggccacgttaccgtaatacggctcattaaccgcaaaaggggatgtcttgatgaaggtgctgatatgccggcagtactgtcgctcaccgcgcaacttttccgccgcgcgctcggcatactggcagacggcctggcgcatttcttcgtaggtggtgatccgctgcccgaagctgcgactgcagacaatctgctgtttcggcggcggcgcttcctccagtgaaatgcaactctcgccgttcagctcacgtaccgtgcgctccagcactacgttgaagtttttccggataaatgtagggttcgtcagcgacagctgtagggcggtggtgatccccataacgtgcagctttttcgctatccggttccccacgccccagatttcttccaccggctgcaggctgagtaattttgccgttctgcgtggattatcgggcgacagcgccagcacccccctgaattgtggccattcctttgacgcccactgcgccgatttggccagtgtttttgtggcgccgaagccgacaccgatcgtcagtccggttccactgagaacatgcccacgcagctgcctgccaaaatcctccagatccatacagtggccaattccccgggcatccaggaaacattcgtcaattgagtattgttcgacgcggggcgacagctcttccagcagggcgaccacacggttactcaggctcgcgtagagctcgtagttgctggaaaaaacgtacaatttttcaggaaactgcgcctctttgagctggaaccagggggttcccatctttatacccagcagtttggcttcagcactccgggcaataacgcagccatcgttgttactgagaacgacgacaggtttgccgcgcaaatccggcctgaaaaccttctcgcaactggcgtagaaggagttgacgtcagccagggcgaacatcagtctgccctccgggttttatgaatgaaggctgtcaccacgccgaaaatttgcagcgtttccggatccgggtacagggaagggaagtccgggttcatcgcctgcagggctggccgcggcgtcagaagcaggcgttttaccgtaaattcaccctcaatttccgcgataacaatatccccgtgccgcggctgttctgctttatccacgaccaacagatcgccggaatagaggccaatatcagtcattgagttgccaatcgccctgacaaaataggtggagtggcgccggtgaatgcagtactcattcagatccagttcagactcagtgtagtctgctgccggtgacggaaaacccgcagggcatcgctctgtgaacaaaggaatttttactatgctggcttctgatactgcaggaatgaacttcatcgttttttccctcgcttaaggctgtatatatatacagtgtgcgccgggagaccggtaaagatcaaggggtgaaagtccccgaccattgaaggaccagcaatccacagggtccccgagtcatgcgttgtataccgtgaggtatggggcgaagcgttgacaggggtgttgacaggccagccattgagccacgaaatgtatattaaattcccgggtgccgacgttgtactgtttacggaaggcaacatcatagggtgcgttactgcgagtgccatatggacccggcggggtctgagaccctggcatgtcaatacgatctttacgcgggaaccgggagatctcccctctgaccatctgccagtgccggagatggcccgcaccgggaaggcgaggagccgaagccggtgatgtacggagaggagaagtcggactcgctcatagtagctgcgaatctggcgaacaatccgcaaggagcggagtcagtggagcgaaggagcggggccaagggaaacgcggaacagccacacatgcgccggacgcagagccgggaaagtatgtcacagaggctgtcacgcgtgcgggaagctgcgaagcagcggaagaaagaacggtttaccgcattgttccacctcctgacagcagaggcactggagaacgcattcctctccctgagcaggaaagcggctgccggagttgatggtgtcaggtggaaggactacgccgaaaacctgaaggtcaacatagcagatctgcaccggaggcttcatcagggtagttacagggctcagcccggcaggcggcactacatcccgaaagcggatggaaaacagcgcccgctcggcatcgcctcactggaggacaaaatcgtccagtatgcgctggttaagatcctgaatgcagtctacgaaaatgactttatggggttttcatacgggttcagacccgggcgaagccagcacaatgcgctggacgcactggccacagggctggttcggaccaatgtaaactgggtactggatgccgatatcagtcagttcttcgacaaggtaagccatgaatggctaatcaggttcatagaacacagaatcggcgaccagagggtaatcaggctcatacgaaagtggctcacagccgggacctcagaggaaggagaatggcgggcatcggaggaaggagaatggcgggcatcggaggaaggcaccccacagggtgcggttatctcgccgctgctggcaaacatctacctccactatgtcttcgatctgtgggcgcatcagtggcgacgccgccatgccacaggcaatgtggtcatggtcagatacgcagatgacatagtcatcgggttcgacaagcgaatcgacgctcaatgctttcgtatagccatgcagcgcagactgaaggagttcggactcacggtacatccgaagaaaacccgactgacggagttcggccgcttcgcagccgaaaaccgcgccagcaggggaaaaggtaaaccagaaacgttcaacttcctcgggttcacgcatatcagtgggaaagatcgtagtggcaggttcatgctgatacgaaagacacgccggggcaggatgacggcgacactgaaagcgatcaaggacggactacgaaagcgctggcattactcaatccccgaacagggaaaatggctcaggagagtggttcagggatacctgaactaccactcagtcccgggcaactatcccatgatgcggaagttcaggatatacgtaacagacctctggcgacgggcgctgaggcgcaggagccagcaggatgatacgacatggacgaaagcaaacagactggcagccgtatggctgccgaaggttcgggttctgcatccatggcctgtggagcggttcaccgccagacacccaaggcaggagcccggtgcgtgaatagcgcacgccgggatctgtgcggggggtacccggtaacgggtatccctaccgcgacattattttgcggaggccgttttttttcaagtcatcttgttgccgttgtctgtaaccatttgctgttcctgcaaaaacagggaaatttcagaaggatcgctgccagtccggagaatcgttatctaataaaatgtaatatactgacgtacagtgcatttattctgagtggagtgattatgaatacgggtttaaggcaggttctgcgatatgcaggcgtcccggttgacgccgctgaaccggtgcgccggcaattcggtagccgcctgattttaatcgtgacggttgctcttcttccgctgttgattgttgacgtccctcagtggctatttgtgctctctcagattatctggggaagcggtatgtacattggtatctccgtggccagtgataaaccagatcgccgataagctcagaacgagaggtctcccgggccgcctggtgacgggcagctgataaactggcgccatgccatcaacaccggataaggacgtcgccggcttgtctttgccgccggctccgctttgtccggccccctccctccggtctgcggcctttatacgcagccatcgcgtcgcgatgccagcttctgcttttctccctgcgctcgtaaaccgcgacaggggacctcatgttgtatctcctgcatcgcttcgggtagtgccgtgccttcactttagcccggccgctgcagatgcaagggttcgctggcgccgccatcctcgcccggtcgcagtttttttaggaagctcgccgttcttcccgtcgttttctcgctcaggttcgctctaaaaccgtccagaccagcttcgtgctttatctgcgctgcggcctccggtgtcgcccttgcatcttccgctttccgccgggctgtcgtgtcggcacggcacaacccggtgccgcaatcttatgaacctgtggaggttgctatgtatcatgcccgtcaaaccatgctgaatgtagaggagtccgaccgtctctcgttcctgccggatctgtttggtaacgattttctggccggagagatgcaggtctatgcgctcgctgagaaacacatcaccgattactgcggaggcttctggcatttcatccgtattccggagggcggcggctacatgatgcctgacggtgaccgtttccatctgactaacccggataactggtttgatcggtccgtcagcgcggatgcggccggagttatcattacggcgctggcgatcaaccgccgtatctggctgcaccatgaacgcggtgatgctgccctgacacgccacctgatgctgcgggaatcgcagctgtggaatttcattgactctcatgacgaatgcgctgctatttacgcggctctggactgatactatatcggggcgcccgacgccccgtttaaggtcagagacggcacgatctgtgaggagcttacccggcttcgcagatcggtgcggccgcgcgaaaatcctggcaggcttcgcctgccagtgaggcggttcgccacacctgcggcgctgcgtactggcctcacctcaacaggtcgccagttaaggattaagagcgtaatatctgcgtaccttttcttcttttgctgattttgcgtatgtcgcagtggaatattgcctctttttcaaaggaggagcaggacaaagttgccgtcgatagggtggctgctgatgttgcctggcaggagcgcatgaacaagcccgtcatgccggaacttgttgaacgggaacagcctgaacacctgcgcgaatatttccatgaacggttccgcgtacatcgactgaacagtcagcagctgccgcgcgcaaatgcacccgaatataataaaccgggcgatgatcagcagaattgattttcttactcagtgtgtccagggagggtaatctgtgcgtatgtctctgatgtttgctgccgtgacgcttttaaccggtattaacctgttttttattccgtttcagcctgttccggctctgtggggggctatcctggccgttgcttttgttctgattaatgtcgtggcggataagctgcgcctctggagtggtattgcgtggattatcgttgccggcatcatcataacgctgatgctgaaggggaaagagccgggtgacgaatttcgtgtcctgatcaccgttttcgctttcctggcttcaatctggtatagcgttgcgcagttcaggaaggaaaataagctccgttcctgacgccccgtctggtatgccgccggtttatcatggcttctttccggcggcatgaaaaacatattctctccagcctgcatctttacgtttccggcttgctccctgctgtctgtctgctttctcttcttcttcctgctgtgatgtctctttttaacccttaaaggctttaaaagcacacccgcactggacaccttcggctcccggccagctgcgctgtccagtcgtcgagccacactccgctaaccgcgaaaagacgcggtaaactccgccgaacccgctacgcggtttcgggcctggcggctagtgtctgatgtctgaagtcaaggtcaacggcagcgcttgctgcgaccgttccggccgcgccgctttcaccgtgccggcgataaagctgccggcactctgcagggcaacgccgtttcgcgcccgcgctcttcgtcgttgcggcgggtgcctgctccttccccctggcgccgtatcacccgtttgagtccattcgccggggctgagacaagcacagtcgccatcatccgtccagggtaaatggcacgcggtaaaccgcgccctggacagctgccgtcgcccgtgctcgtttacgcccttgcggcgaacggctctcaaacgggtgaagttaataccagggggcaggttcagcaggtccccgcacaaagtcaaaaccgcggccccggcaactcaacgggtgatgttctttaaaaatcgggaaaaagaaaaatgcaggatccttcattgcgaacgtatcggatcgcatttctgggaagcaatgccagcggcaatctgccgatgtttacccgggtgcaggccacgaccggaaaacgggcgataaaagcgtttattgaacgctgtgaacccgtcaaaggctggtttctgggcgcaccggaagacattaccgatcaggttcagaaggaggaagaagaggcgggaagcaaaccgcaggtatgaaaaaagcagggtaaaccctgcttctcccacgccgtaaaaatcgcacgaacggtttttccggcttcgttaactaccataaggagtcaactttatgatcgtttctattttttcaccttccgcaggcgctgtaaagccccgtcgtcattcgcgcattctgcgcgcagatatcaccgcaccggagattgatcccgctctcagagctttcgggcgtcatatcgccagaagtcaccgcaaagggcgcggtgtccacatccccgcgatgaaaaataccgccctcgggcaggtactccgcacgctggaactgaaacgcgcatttaactgatgaggtgagccgccccgcgaggggcggcaactgcaggaaggagaaaacacaatgacaccgactaccgcacagatcatgacggaaaataccgtcagccagacttaccgggcaacctattcacccgatgataataaattgcgactttacgcatcattacggctcgatgaagaaacgtattccctgatcaacaaagcaggctttcgctgggcgcccaaacagaaactctttgtggcgccagcctggacgccggggcgggaggatgtcctgctttcgctcgccggtgatatcgaggacgaggacagcaccctgtttgatcgccaggagcagcgcgccgggcggttcagtgactacagtgaccggcgggcggttgaatcggagcaggcgcttgcgcatgttgattcgctggcatcggctgtcccgctgggacagccgatcctggtaggccaccacagcgagcgccgcgcgcgccggcatgcgcagaaaattgagagcggcatgaaacgtgccgtgatgctgttcgagcgtgcggaatactgggaacagcgcgcgcaggcctctctgcggcacgcaaaatacaaggagcgtccggatgtgcgttaccgccgtatcaaaaaaatcgaggcggaattacgcaagtcccaaaagcacattgcccggtctgaaaagtatatgacgatgtggcgtgcgcagacgctcgatctgaaaatggcgttactggtcagtaattatgatcatattcatgcctgcttcacgctcgacaaatacccccgcccggcagagaaaagccagtatgagggctcgatgtctctccattctgccctgtcggaggagatcattacttttgaacaggcgcgtgatattgcgatccgctgtcatgagcgcacgattaaccaccaacagcgctgggttaatcattaccagaaccgcctggcctacgaacgcgcgatgctcaatgaaaacggtggcgttgtcacccgaacacaggaatttgaaccaggcgggcaggtactgagccggggagaatggttaaccattctccgggttaaccggagtaagggggaggtgagttcagtcgaaacgcccggttatcgctttctgggctacagcggcacgatgaaactcacgcccgaccgtatcacggactacaaagccccgacagcggaggaagccagcgacgcgaagaaagcggcgaagcgcccaccgatcgtcaattatccgggggaagggttccgggaaatgacaaaagccgagtgggcgaaattacccgctgattataaaggcgtgcggggtgctgcagaaaccgaaacacacggcgcctaccgcttccgccggtgcatgacgcacggttgtacgctcgtgaatgtgtatatcacagacatgaaaaccgttgaaattccgaaaaaatagcaggaaggctccccggcatcttgccggggaggtcagggagtacattcatgcatcatgaccttaaacaccgtattcaggcgatgcgggtcaaactggaagggcgcgcccctgtcgctgaaattcggggtagctcgcaactttttgtcaccccctccccggaatgtcgccggttagttgagctggctgatgtccgggaaaccgatcgcattctggaacccagtgccggaacgggcgccatactgcaggcgatcagggatgcagtcccccgggcgaagtgtgacgccgtggagctgcacgccgggttagcccgtcacctgcaggctcatttcccggaggtccggatctggtgcggagattttctcgaatatcatccggagcgccggtatacacgaattatcatgaatccgccgtttaatcgcggtgatgatatccggcatatccggcgggcattaactctgcttgagcctggcgggattctgacgggcatatgtctggacgggccgcgtcagcaaaaggcgctggagtccctggcggacgtctgggagccgttgccacggggaacattcacgtatacccaggtagcgaccgccattctcagaataaccgtctgatgacacgttaagccggcggggcacctgtccccgtctggccgcgcctcgaaagaccgcgcgcctgcggcgccgggaaaaccgggccgcgctgacgcgccgcccgcatttcctttccgcgtcttccctgtttgctgcctgctgtttgcctgcttcctctccttctccctgctgtgatgcctctttttaaaccttaaaggctttaaaagcatacccacactggacaccttcggctcccggccagctgcgctgtccggtcgtcgagccacactccgccagggcagctgcttcgcacccgccgggctccgccgaacccgctacgcgctttcgggcctgacggctagtgtctgatgtctgaggtcaaagtcaacggcagcgcttgctgcggccgttccggccgcgccgctttcaccgtgccggcgaaggactgccggcactctgcggggcaacgccgtttcgcgcccgcgctcttcgtcgttgcggcgggtgcctgctcctttcccctggtacccgtatcacccgtttgagtccattcgccggggctgagacaagcacaacccgtcttgctgtccaggggacggcagagcctttcgcaataaatttttcccggccattccgctgcgcttcattagaccgaaaaaaatttcccgctcacccccggacatctgcaccgggccgtgctcgtttacgcccttgcggcgaacggctctcaaacgggtgaaggttatatccaggggcaggttcagcaggtccccgcacaaagtcaaaaccgcggccccggcaactcaacgggtgatggttaaaaaattaaacaggtgaaggagaataatatgcgtttagcatcccgatttggacttactcattccattcgtcaggaacgcccactgactaacgatgaattggtcaaggttgtaccttctgtgttttcagaagaaaagcataattcacgtagtgatcgctatacctatattccaaccattacactgctggataaattacgtgaagaaggtttccagccattttttgcctgtcagtcacgagtaagggatgaggataaacgggggcatactaagcatatggtaagacttcgccgtgaaggggccaataaaggaacagaagtacccgaaatcattcttcttaactcgcatgatggatcgtccagttatcaaatgatcccgggtatgttccgttttgtatgcacaaatggccttgtgtgcggtacgtcgtttggtgagattcgtgtacctcataaaggtgatattgtgggaagggttatcgaaggtgcttacgaagttttgggaattttcgataaaataactgaaggcgttgatgtcatgaagtctattaccttaaccaaggaagaacagcgtctgtttggacaagctgcattaacctaccgatatgaagatgaaaataaatctccggtcagtattgaacagataattcatccgcgccgttatgaagataaaaaagatgacatctggactacatatcaaagggtccaggaaaatctgattaaaggcggtttgcctggccgaactgaaaaagggaaaagaacaacaacccggccagtaaaagcaattgatggtgatgtcaaactcaataaggcattgtggttaattgcggagaaattccgcactcttaaaggctaattataagcgccgggcagctgtccggcgttttgatggtgggaatacttatgtttgaatttaaagctgtctgtatcagtatttcacatatggaagaaggtgatatcagagttcttcaggtgctttcatcaacaaccaattatctaacttgcgatagttacttagagtggatacatgatacaccttatggttgtgttataaggatgtatgatttcaaacgccatcttctggcgctaaaaagaggtggggtgtcaaaatttttacgcaaaaatctcatactaatgcaccgggagggcgggtatctgctttttcattttgatagtgatgccgattattatccaggtatagatgccgtagatttttaagaaattcaagccttcttatatcagaaggctttttagttcatggcgattttctgatctttagaagaagttcgtttgcttgctttgatagccgtgtagtagtaatggatcttcttcgcatactcgtaacgtcttgctgcctggcgcggggtctttttgaagcctgcattgtatgccccgactgcatcccacgaaacgccccactttttaaacgcctgagccagataataggctccggtgtagatgttaagacaagcatcgctaagaagatgatccggttttattccatatcgcgacagttcgttgaaatgctgcgagtcaatttgcatcaagcctgatccataacccgtaacaggattacgaccaatcgcatcaattttaaatcgtgattcttgccatgatatagcacgcaggagatccggatcaattttgtaatccctgccagccatatcaaagcagtctgctgccattgatgacaatggtattaaagacaggatgataccaaacgctgctcccttcatgaattcccctccgtgccaaatcccggaataaccttaacccatccaagaccgagactcaacatatatgcactcctcaccacaaaatgaccacacactacncaaaattaaaattttgcagatttcactttagcttcagtggcttaactgtagttatattacattatgttatttttctttatatatatgtgagttgccggcgagtcagtagtaagtcgtcggtaagtctatagcgactcgtttatgactcactcttttataatcatatatttaaagcgacttaactctagacttaagtcgccatgtgactcgtaatgcaactttcttagactctagacttaagtttagagttgtaaagaaggtaaactcgcgttatcttctcgccataataacttgcttgatgctgtttttaataaaggaaccgatatggccagggtacaagcttatgctagtgatgaagttgcagagaaaattaatgcaatagtggaaaagcgaagggctgaaggggcaaaggaaaaggatgtcagtttttcaagtgtcgcttcgatgctccttgaattagggcttagggtttatgaggctcaaatggaaagaaaagattcagggtttaaccaaactgagtttaataagattttgcttgagaatgtcatgaagactcagtttaccgtatccaaacttttggctattggctctctaagccctcatgttacaggtgatgaacgattcgagttccgcagcatggtgagtaacattcgagaagatgcaaaagatgttatttctcacttcttccccgagcaggaagaagagtaagaactggtgtgtgtttatggtggtttgtaattaattcagtagtaaaaaaagaataatgatctagctttaaaaagtgacatggaagaataaggaatatagaatacttacagggttgtaataaaatttgttgaagcgttgacgtccggggctagtccccccgaacgtcaactatccatagtgtcctttccaggaggcgcctatgtgtgcgaaggatcgtagtcatattgctgtgcgcagtcaaacagattccattcattctatgcgcgagatgcttaatatttcatcttgccctgcttttattcgtgattcccggggcgaagtaattcacaccagcccaacctttgacaaaattttcttaacatctggtggaactggagcatttgatacacccagagcacctggaagctggtttctggatctctccctggagatcaaactggaactgatgcagtcagaactgaaatcgttttcagaaggttctgctgtacttgttaaaaatatttggttggcaggttcactttggactgtttttattgaaacgttctcgattaatgaagatacatacagtaaatgggtttttataaatgaagatgaaccgatgcctcatccttcaatggaatacaatgacttttctataaagatgcaaagatatatcgaaagaattcagcgttcagcaaagtctgactgggctatctttaatctgtatgcggttgggttttctcatgcatctatttcgaagattacaggtgttggggtgcaaacctcaaaaaatacagttagtaaaataaaaaaggaactgagctttgataatcgtgactatatcataatgtcatcgatctatactctaagttatggaaagtttatatcgaatgtggtttcgatnnnnnnnnnnnnnnnnnnnnnnnnnnnnnnnnnnnnnnnnnnnnnnnnnnnnnnnnnnnnnnnnnnnnnnnnnnnnnnnnnnnnnnnnnnnnnnnnnnnnnnnnnnnnnnnnnnnnnnnnnnntattaaaggttggtaatcttactttggaggtcgattggaaagagcgattaggagcaacgcacgacctgcgcctggaaaaaatgtgcttttaaaattagatgaagaaactaatcgtcgactcatcaaagcaaaagacagaagcagaagaagtaaaacagctgaagcttatttgagactgaaagatcatctagaacgttttccggacttttataactcggaactagccgtaccaggaggtgaaaaggaagagtgatttaacatcatagtcaaaaatctgttttatatatcaacctttctttttaaaggaaataaatatgaatgctgtattaagtgttcagggctctgctgtctctgaaaaaaccaaaccgtcttttatgtcccgcgttttcaataaaaagaaagccctgaaagtcgctaaagttgcgctgccggttgctgctgtggcggcgttcttcccggatgctgcgatggccaccaccacggcaaccgacctgatgaagtccggggatgcgaccgttaaaggcacgtttggtaagcaatccagcgtagtcaaatgggttgttctggcagaagtcgtcgccggtggcatcatgtacatgatgaccaaaaacgtgaagttcctgtttggcttcgcgattatttccacctttatcaccatcggtatgtcggtcgccggttactgacaggaaacacgtgatgacgggagacgaattaaagcgataccgtttcccggaaacactgactaaccagtcccgctggtttggtttatatctcgatgaacttatcccggccgtgatttgtctcggctggggtttctggaccagcaagttcatttttggcatagcttcagcggtactggttttctggggtatcaagaaactgaaaaaagggcggggcagttcctggctacgcgacctgatttactggtatctgccaacctcccttcttaaaggtttctttcatgatgttccggactcctgtttccggcagtggattaaataaatcaacggggaaataacatatggaacatggtgccagacaaaataccacccgcgttatcgctgtgggatttatcagtctggggacactcctgaccctcagtcttgcaaccaatattatccaaggcataaataattaccgtctgcagacggaacagaaagtggcggtgacaccgatgttattccgtgcaccctttgcggtgtctcagaaccaggctgacgcctcttatattgagcagctgggcctgtcctttgttgccctgcgtctgaatgtcacgccggaaacggttgatgcccagcatcagcagctactccggtatgtattacctgcctcgcagaacagcctcaaggtccatctggctgaagatgcgaaacgcattaaagacaataacgttaattccaccttttatatgacgtcgatgcgtgcctggccggcagagaaccgcgtggatatccggggtgagctgaaaacgtggattggggattccaaaccctacagtgaaattaaaagttatgtcattcagttcagtcgtgtcgatggtgtcagctggctggcgcgttttggagaaataaataatgaaaaaaattaacccgttatttatttcaggctgtctgctgttggtcgcccctgcgatgtccgcgaccctcagcggtacgctggagccgacagtggttcccctgaccaatggcggtcaggcaaatattgccgtgagtaacaccgatccgaatctgttcacagtacctggcgatcgcatcacggcgataaacagcctggacggcggcctgacaaatcaggagcagaccgacagcggcggcgccattctggcgaccgtcagtaaaaaaccattcaccttcattgtggaaaccgaacgcgggctgaacttctccattcgtgccgtgccccgtgcgggctcaggccggacaattcagctggtcagcgagctggcgggtacccccggtccggcaaaagcctgggaagagtcgaacccctatgaatcgttactggtttcgctgaatcgcgccgtgcgtcagggcagcgtacccggtgagtatcagtctgtccccgtcacttctgaagtactgcaggtgccggctggtctgcgcgccactgccgatcgggtctgggtcggtcatcacctgaaagttgtccgttacagtctggacaatgtctccctgtcggcccgtatggtgcgtgaaagcgatttctggcagcccggaacacgtgccgtcatgttcagtaccccggcgggcctgctgactgccggtggtcgcatgcagatctgggtcacgacgtcagatgaaggagtgaagcgctgatggccaacttcaacacgctgatcaaacgtaagcaatatatctggctgggactcattctggcgggcggcgcggcagccgtcggaggcgggctgtatctgtcagatctgaacatgagctctgatgaggaagccccggctcagggcgaacccgcaccggatatgaccggggtggtcgacagcagcttcaacagtaaggtggagcagcacgcgacaacagaaatgcaggcgactgccgctgatctcaacaagcgttttgactccctgcagggggaagtggacctactgagtaaggcgcgaaccgctgaccagatacgtatcgacaagctcagcagtgacaatgaagccatgcagaatcagctgaaggcgctgggcgtgaaaccggctgtctctggtggcgagcccgcgccgactcctccgtcaccgccacccggtccggaaggggagccgcagccagccagttatccgccgcaaaccggcgccgcggtaccgcctccgacggcattctatccggggaatggtatgacaccgccgccgcaggtcagctaccagtctgtaccggtaccaaaccagatacagcgtaaaacgttcagttacgacaaaggaaaaaaaacgaagtcattgccgtacattccgtcggggagctttgcaaaaagtatgcttatcgagggggcagatgccaacgcgtctgttaccgggaatgaatcaactgtaccgatgcagttgcgtatcaccggtcgcgtggaaatgccaaacagcaaaacctacgacctgacagggtgttttgtgggccttgaggcctggggagatgtctccagcgaacgcgccattgtccgtacccgcaatatcagctgtatcaaaggtgataaaaccatcgatcagcccattaacggccacgtttcctttatggggaaaaacggggttaagggagaggtggtgatgcgtaacggaaaaatcctcggctgggcatggggggccggttttgttgacgggattggtcagggcatggaacgggcttcacagccggctgttggcctgggggcaaccgcaactgttggcgccggtgacgttctgaaaatgggggtcggcggtggtgcatctaaagctgcgcagacgctgagcgagtactacatcaaaagggccgagcagtatcacccgatcattccgattggtgccggcaacgaagtgaccgtcgtgttccaggatggattccagctgaaaacgattgaagaactggaagcggaaaagaacgggcaacagcaggctcagaatcaggaggcggagccggcaccgcaggctgatgcacatcatcagtcaggcggcggtatgaacggattcaatactgacgagatgctgaagaagctgggcaaacttgatccgcgtgagttctctccgggcgcagcgccgcagggggaaaataatggctaagtctctcattactgctgttctgtcagcactgcgctgggctcactggctggttaagtgtgcggtggtgtatccgctggccatgatgatgttactggttgttctggtgttcctgacgggaccgtacacgttcggccagacgctggtgaaaaccgtagagtctgtgcagcagtagggatatgtcattcaggactgcacggggccgaaagaacttaatggtgatgcggtgaacgctccactgcctccggttttacaggaagactgcaccaccgtcagtacggatgcggcagggtatgcagcatatatcgaccagagctatacgcataatattctctggctctggctgctgatggcggtggtgtttaccgggatcgctgtggttttccgtcggactcctgtccgcagggtgatcatacggaaaaacggtgttgtcgtcggagaggctggttcgggttcttcagggctgattctagcccgatctgatgtcagccagattaagcgtgtttactatgaaatgagtccggatgaaggggataaatttgttcgggcgattaaggaaaatacccaaatcaggatgaacctgaagaaataaccgataaatagcgagaaatatcatgaaggaattaatgctgttaattcctctgggcagcgctttgctcttaaccgggtgtgcgggcacagagaccgaatttcaatgtaatgccacgacgtcggatacctgtatgacgatggagcaggcaaatgaaaaagcgaagctgaaggaggtacgcagtgatgcaaagccggctgcggccgggttgccacaactggctgagggtaatttcagaaccacgtcagttaattcgttcccgttgccgcctcaacccaacctgaaccgggccagagtggcagcggagagagaacgagcacgtgcagtgtacctaaataatccaacggcaaagaatgaggcaatatatttcgaaaccgagaaaaggctccagtctttgccggtagtgaaaatgtctttaccagtagtggcgtcaacgtttacgtcaccgtcaacaccgccaggtaattatccccggccattaagaaaaggggaggagacaacgtcattgtggatagcgccgtatgtggattcagatgatgtatatcaccagccggcaacggttctttttgtcgtaaaaccatcggcgtggggacagcctcgccttaattgattcacagcgccattgctggcgctgcagtagtgttccatttctgaattataacgagtgccctctgcgttgaaagggatgggcggtagcgtgtgaaatgaacgtcgataacgaaaaatgaaagaatttgaaaaatgactgactcaatgaaatatctatggctgcttttgcgcgaagattcgtcatatatttttatgttgattcttattgttggttctgccgtaatcgtgtcttccttttttcagagagtaatcacatcctggtggggtaaaaccctcagtgtgatactgtgtatggtgagtatgattactacagcaacaggagttcttgatcctgagtcaacatataaacaaattataaacaggaaagaaaatatcatttatacgcttagaaattgcagagtctccgcatttgaagcgcagcaggcagggtttctggctaaagcaaaagatgcctggtcttgcccggatggcgtaacacggtatatggatgtgagatacagagataaggcagagattaataaacttagtacggaaggtaagtaacgttatggatgaattattcaaatggacgatggcgctggtgtttttattgacaggttatcgcctgcttttttctagtgacagtaatacagtgcccgaagttctttctcatcactggaaaaatgactgccggttgcttgagactaatattgataaagggttttctctccagcgcaaaatagacttcagtgtggtgatgttattgaaaatgtcagcaaggctgattatgacagagcgataaggggcgataagcaaacaactatcgcagaggcaatgaaagaaatattcattcgttaatatataaacagargcaataaagtatgcatgcctttatttttctggtgctgatgacgccgagtagtggtggtggaatttgggatattactcccatgcctaatacagatgtctgcataaaaatgctacgggtactcgaagcacgtggtggcagaggttacggaagtaatacaggagagtgcattgaaattaaaacccgcgagcctttgagcagcgtgatagaaacattgagtgagggtgggtaaatggctgaataccagttaagttttgatggttttgttcgacttttttttgcaatggcaatcattatctgcggttacggctatgtaattattggtgtttttataagagatgcgcttgcctatattttaatgttgtttgggcttacaggtctcagtgctttattttctttaatggtattcatggataaaaatatgtgggccggttctcctgatttgacgctatcagtaataacgggatttttttcagccacagtgatcttttatatgttttatgtcttgatttattactttgatcggatgggggcgggtgaatagtaagaccggtggtcagtgttaacaatctcacgttatttgaaagtatgcagcataaggaataagaaagtgaaagcgtactatatacttggacataacgttgcatggcttaacggtatatgcctgattctttttgttattggtttggtcggtgcgctggcaatggttgccatccctgaaaaattcaatcttcgagttaacagaggcgatacattcatatactgtgcgcttatagcggtggttgggttttccgggatgttcgttatctccattcactcattttcgatggatgaacttgaagcaggtagacactggaaagatgactgccggacacttgaggtaaacatgccgacaggcgcttttaccagccctgttaataaactggactgtgatggcatcatcattaatgtgcctggtgggcagtattattcctatatccatcagtgggaattatataaagctaactcaaaatgaaatgctgattaataaactggattgaccggtagggatggaacaatggaaagacaacaagaaattgaagagcgctctcgggatttaataagaaaggccgatgaaaaagaaaggcaagaattgaaacgttttgatctgctatatggtattttttgggttcttcttttttttgcttcagctggatgtttttttgttcagtatgaagattttcgcgatatgcagcccgccactccagaacaactgcaaagtattattcatgatgcgccttgtgcgggtgaggcttttcggatggctcttcaaactaataatgtgacttcgtcagcgacattaacttttggtgacgcaaaaaagatggcatcagaatgcaaggataaaaaagagattaaagcagtacgtgaaaaacaacttaacgcactgaacgatatgagcaaataatcaggggatggatatgatgctgtttcttcgaaagtatggatttttgtttacccctccagtctactggctcatctatctgggagccagactgacttacaatggactggcaggagacttttctgctgatttccttcagggtattcgacatgaaggcgtctatattatctgtagtttgtgtgtattttattttttctgcttagaggtggaagttggtgatggcgaattctcagcgaacattctgttcctgattgttttctttcatgtggttttattatttatcactctgcttatttgtttgtggcaaggggaggtgttgttggattcgatctttatgggtcagattatcgcctccatgtgtttattgtttttcattcctgtgctttccattataaggaggagtttctagtgcggctgtgaatattcttcttgccatttattacccttgttattttgaaatgctcttaaaggaacgcctgcatgagtaataacatcatcgatgccgtcacccagactgtgaattcactggtatcagcactgaagctgcccgacgaatctgcaaaagccaatgacacgctgggcagcatgaatttccccagttcagccgtattctgccctataaggattatgattccgcgaccggtctgtttattaataacaaaaccgtcggttttatgtttgaggcgcgtcctttacccggtgcggataaaagtatcgtcgccacactggagcatttactgcgcagcaaacttccccggggcgtcccggtcagttttcatctggtctccagcaaactggtcggcaatgatatcgactacggtctgcgtgaattccgctggagtggtaaacaggctaaaaagtttaacgccattacccgcgcctactatctccgggcggcggaaacacaatttcccctgccggacaatctggatttgcccctgacgctgcgtaactaccgcgtgtacatctcctgctgcgtgccccggaagaagaactccgccacgcaaattgtggagatggagaaccagataaaaatcctgcgggcgtcactgggcggggcttacattccgacgcgtatccttgatgcggccgggctggtcgaactgatgcgtgagctgattaacccggacccgcacgagatgtaccgcgtaccgtataagctggacccctatcaggatctgaactatcagtgtgtcgatgacagctttgatatgaaggtcacggccggtcatctgaaaattggccgcctggggcgcgacgggaaagagtgcgtgacccgggtgacgagctaccatctggagaaagatccggaaatggccttcctctggtccaatgcggacaactacgccaacctgctgaacccggagctctccatctcctgcccctttgtcatcacgctgacgctgatggtggaggaccaggtgaagacccagaacgaagccaacctgaaattcatggacgtggagaagaaaagcaaaacctcctacgcgaagtactttccgaacgtgataaaggaaatgcaggagtggggcgatatccgccagcgactggcgaccaaccagacctccctggtgtcctacttctttaatatcaccacgtataccgccgataacgcagaggcctctctcgctaccgagcagcaggtgctcaacagttaccgtaagggtggcttccagcttatcccggcccgctaccatcacctgcgtaattttctggccatgatgccgttcaaatgcggcgaaggcctgttcaaagagctgcaggcggcaggcgtggtgaagcgggctgagacgttccaggtggccaacctcctgccgatcgtcgctgacagcccgctggcgccggcgggactcctggcccccacctaccgaaatcagctggcgttcatcgacctgttctacgagggaatgaacaataccaatttcaacatggcagtctgcgggacgtccggggcgggtaaaaccggtctgattcagcccctcattcgcagtgtgctcgactccggcgggtttgcctgggtgttcgacatgggcgatggctataagtccctgtgtgaaaacatggggggcgtatacctcaatggcgataccctcaagtttaacccgttcgccaacgtgctggatgatgctcactttgacatgtcagcagaacgtatacgcgatcagatgtcggtgatggccagtccgaacggcaacctcgatgaagtccatgaaggtctgcttctgcaggcagttcaggcggcctggttaagcaagcgtaatcatgcacgcgttgatgacgtagtgcagtttttacaggacgcgaaggacagcgatgaatatgctgattccccgacaatccggggccgtctggacgagatgataatcctgctcgatcagtacacggtgaatgggatctacggggactatttcaactcagataaaccaacacttcacgatgacgcccggatggtggtactggagctcggtggtctggagtcgaggccctctctgcttatcgcggtgatgttctcattgattatttacatcgagaacaggatgtatcagtcaccgcgtggcctgaaaaaactgaacgtcatcgatgagggctggaagctccttgatttcaagaatggaaaagtggggcagtttatcgagaaaggctaccgtaccgcgcgtcgacataccggcgcatacatcaccatcacgcaaaatatcgtcgacttcgactccccgaccgcctccagcgccgcacgtgcagcgtgggggaactcatcgtacaaggccattctgaaacagtcagcgaaggaatttgccaagtataaccagctgtacccggatcagttcagcaagctggagaaagacatgattaacggcttcggctcggcaaaagagcagtggttctcctcctttatgctgcaggtggaagcgaactgctcctggcaccgcctgttcgttgacccgctcagccgggcgatgtactcctccaaaggcccggattttgagtacatgcaagcgcgccggcaggagggggtcgatatccacgatgcggtatacggactggcgtgccgcaactttaaagacgaaatggcagagcttgaatcccgaataccggtgaatgacatggaggataaacagtgatgaaaaacaacaccgaacaaccggtcagtacgacctctcatacctttcgccggatacctgtcatcgttgctctcgtgcttttcgccctggcaaccagcgcgtttctctcacgcgtggttctggagtactccacgccgcgggtggtggcttttgatatgaagaagacgctcgacagctttatggacagtgtgagtcagaagcagctgacagaggcgcagtccaaagcgctctctgatcggtttaacgacgcgctggagaagagtctggcggagtatcagcagcagcatcatgtggtcattctggtttcacctgccgtggttcagggcgcgcctgatgtgacccgcaacatccagcacgacattgcccgccggatgaaaggagaacagtaatgatacgactgaaagactgtctgctcgccgcctgcctgttatcgccgctgactcaggcggctgatctcggtacctggggggatttatggcccctccgtgagcaggacatgctgcagctcatcacgcagcgtctgcagtcgctgcaatcctctggccagtgggaccagacgatggacgcgtttaagcagcgggttatcgagaacagtcagcgtccggcgccggtggaaggcattaagcgtgcggagaaatacgagcagcgctggtttgatcccagcatccgactgaccgaagacctgaaggacaatgaggggcgggtgtttgcccgcaagggcgaagtggtaaacccgcttaaaaccgtaccgtttgtccagaccctgtacttcatcaatggtgacgatgccgaccagctggcctggatgaagcgtcaggtgccggaaaccctgatgagcaaaattatcctggtgcgtggcagtatcccggacacctccgcagcgctggacagccggatctatttcgaccagaacggtgtactgagcaagcgatttggcctgacggcggtcccggcgcggatcacgccggcgccctccggtgaacggctgaatattgagaccttcccgcccgtcccgcacccctgatctggggctgcgttttattcaaaagaggtaaccgatgccgatgatactggccttaataatcctgctcacgatgctcttgctgacgctaatgtggtccaccatccgtaagcaggagaatgtcatacgggaactcagtacaagagaaagctggctggagagagaggttgagcgtctcaggaccgataacgagaagctgtaccgctggctgagatacaacagtgaaaaggttatcgatgaaatgacttgtgaactcgatgcactgtccgccgttcgccagacgaacagggattcataccgtcgccagctttacctcttcgactgcctgtccctgatggtgtgggccgggatggagggcgccgaagactctacacgggaaaaggtccgcaataaaatcgatgccctccgtcttgttctcagggagaaaactgacgaatgaaagccatgttttttttaatctgcatcgcgttctcaacgttcagtggccgcgccgccgcagacccctcctgtgagggccggtttgttaacccgatcaccgatgtgtgctggcgctgcatcttccctctgtcgctcggcagcgtgcaggttggtaaaggcgacctgcctgataccagcaatcccggcagtcccctgcagctgtgtccggctccgccaccgctttttgttcgtcccggactggccatcgggtactgggagccgatggccatgacggacgttagccgttcgcctggctgtatggtcaatctgggggcttcagtatcaatctcggcaagaccggcatggggaccgcgagaaaggacgacaagcaggtgaacggcgccttctatcacgttcattggtacaagtacccgctgacgtactggctgaacatcatcacttcggcaggctgtctggaaggcggagacatggatatagcctatctgtccgagattgacccgacctgggtggacagcagcctcaccaccattctgaatccggaagcgatcctgtttgccaaccccatcgcgcagggcgcctgcgcagcggatgcgctggccagtgcattccatatgcctctggatgtcctcttctggtgtggtggaagccatggctcactttacccgtttaacggccaggtcagtaatgagtccagcccgctgcagtcgtcggtactggtcagtgagcgtatggccttcaagctccaccggcagggacaaattatggagagtatcgggaaggacaaggcagtctgttacgaatatccctccccgatcatcccgaaagaacgctggcgctatcagatggtgaacatgtatccggacagtggtcagtgccatccgcttggacgcagcgtgatgcgctgggaggccggcaaaaatccgcccaacacccgcaagaactatggctacctgatgtggcgtaaacgtaactgcgtatttttgtaagtcagacaggaaaaggataaatgatggaaaaagaacagaatcaatgttgccagcaacccctcctgcatcaggatgtatctcccactacatcccgggtcactttcagcacggataaaaaggtactaacggcagagcaatacagagactggcaatacattggcgcaaccctcagagaaaaaatgcagtcgaataactgaatatgtgatgcagggctatgcatttgtcatgacctgtagcaatagccaggcacataactctctctaattgaggtaattatgaataaaggaatcaccgggctggcctgggggctgagtctgctctgcactacggcgtcagccgctgacaatattaatactcccggggaccagcagtggctgaaacagcaggagaacctcagcgaacagctgcgccagcatccggataaacagctgcagcaggagcttgaggcgcaaatcagccgcaatcctctgcccaaatcagaccgccagtttatcgataatctggtcagccagcagaaagcggcgaatcaggaaaagccggcagaaggagcgctgtactttgtctccttctcgatacctgaagaggggctgaagcggatgctgcacgaaacccggcagtacggcattccggcgacactgcgtgggctcgtcaataacgacatgaggaccaccactgacgcggtgctgcagctggtgaaggatggcgtgaccgacggcgtgcagattgacccgacactatacacacagtacggcatccggagtgtgccgtctctggtggtacggtgtcaggccgggtatgacgtggtacgtggtaacattcacgtcaaacaggcgctggagaaagtggcacagaccggtgactgcgcacagctggcccggcaaatacttgatgcgcactcgaatgccgccgggagccagccatgaaagacagaccgtacttcatagcgttaccggaaatggtgagggatgagggagggtggaaatgaagacggttatttccgtgctgaccgcgcattttttagtcctgagcgcctttatctggctggcatctcccgcctgcgctgacagtggaagtgactataaagctggttcggattttgcgaaacaggtgcagggcaatggtctgaactcactgaaaaatttcagtggtgagcaaaacctgccggggtataccgccaacccgaatcagacaaaatactacggcggcgtcactgccagcggagacagctctctgaaaagcgattcagccctggagttcagccagggggacacaggcaaagcggttacggagtcgttcacaaaccggccaccggatcagatatctcaggatgcgccgtttattcaggccgcaaaggatacagaatcccgtgccgacagcattgtcggcgataccggacagtcctgtaccgcccaggttgtgaaccgcagcgagttcacaaaccatacctgcgaacgtgatctgcaggtggaaaatttttgcacacgggaagcgaccctgaaggataacgccaccacgcagaaagttaaccgaacctatcagcaggtggtgacgctgaattatgcccggagtacccggcaatggagtggcaacctgacgatcccgaccaatggtcgtctgctgaatgcctcggtggatggtgagcctctggtgatcccctggattgaagaatgcgattccgaagggaaggtgcgggatagctgcaagagtgcagtgagtgaaagcctgaccctctttgaacgaacgttccccattgatgtgatcagctggccacgttcagaatcgatgtgttcaggcggtcagaacacgcattgtacgaaatatacctatgacgggaaggggaagattcatcagtcgtttggtgtggacaaagcggccactgctgggcagaacttttcagtaagcaaaacatcacggaccgtatcatcggccagccagaaacccgtacaggtcacggtcaccctggtgatggaagaaaccgaaaccgtctatgcacctgaagtcgtctgggttgaaagctgtccgttcagtaaggatgaaggaaaaaaaacgggcgaggaatgtatcagcccgggaggaacgcgaaccatcaccctcggaggcagggattactcgttcacggaggcctgctggaaatataaggatacctggctcacgcaaccggcggacaacggctcctgtgaaagcctgatgaaaaatacggcttgtactctgtcatcccgccagtgcgccttctccagcgaggaaggcacgtgcctgcatgaatatgcaacgtattcctgcgaaaccaggacgagtggcaaacaaatgatctgcggcggtgatgtcttctgccttgatggtgaatgtgacaaagccacgtccgggaagagcaacgactttgggcaggcggtgtctgagctggcggcactggctgccgcggggaaggacatcgcggcactgaacggggtggatgtccgggccttcaccggaaaagcgaagttctgtaagaagtttgctgcgggcttcagtaactgctgcaaagacagcggctggggccaggatgtggggctggcacgctgcagcagcgaggaaaaggcgctggcaaaagcgaaaaaagacaagctgacggtcagtatcggggaattctgctctaaaaaggttctggggatttgcctggagaaaaaaaggagctattgccagttcgactcaaaactggcgcagatcgttcagcagcagggaagaaacggtcagctgcatatcggttttggcggagccagcagtcctgactgtcgggggattacggttgaagagctccagaggatcgactttaacatgcttgatttcaccaactttatggacgacctgatgaaaaatcaaaaaataccggaaaacgatgttctcaccaataagaccaaagaacgaattaaggaaatcatgagtcagcaatccgcgcaataaaccatgctgcctaataaagagaccgataatcatgaaaattaattttcacaaacagcctgccattgattttgtcctgagattaacactgacagtaatcattatttctccggtgatttatttctcctgggatgcagtcaaagggacgtcgggaagtgattatgtcgaaagtgtggtctttattcttatggctgggtttgccatgtctgtgtgttatttgtttttctcagccctggagaaagttataaatgcaaggaaaagcaaagatgaatcgatatatcacgattgagaaatttatagacattctgaatgaagagaatttaccccaggagcatcatgttatggtgctggctgttcttgcggatatctctctgcatacagacaggttcctgattaactcgtccgaactggttcagatggccgctcagtactcacctgctttccagaaactgccagcggaccggcaggcttttatatcttcagtactgagcatgccgctattccttattatgtgaccaggagagtcaatggaagagaaaaaagcatacgggctggtcatggtgtttgtcggggtgtttgtctttctcctggtcagcattatgtcgtacagcctgtggcgggacaggcaggttaacgcatttatgacaaccaaccgggcctgggggatccagtgcgacactgtttctcagaccgcgtgggtggtcagggacggggagcgggtggaccttcagataaatcatctgcctctgtactgcagcggttaccgctttgaagcccgtgatgatgcaggaaaggtacagcgccagctcgataaatacagtgtctatcagcatctgtcacgccagtcgcaataattcataaaagggtatttgtcatgcgaacaatacatgccgccatgctggcggggtgcctttactgcgccctgatgccggctttcgccaaagatgcgggctggcagtggtacaacgagaaactgaagccccgtgatgaggaaaggccagccgcaccagcggcaccaccgccgcaaatggatattctggagaaactcgccacactccaggcggccaccaaacggtcgctgtacgaagccattctgtatccatcgtctgaaaacttcgtgaagtacttccggctgcagaactactggacgcagcaggcaagtttgttctcgatgagtgcgaagaaagcgatgctggaaaacccggaactcgattacaacctgcagtacagccactacaacggcacggtaaaaaaccagctcgccgccgactatgccgaacagcgtcaggctatctccaccctcgcacagcactacggcgtgatgttcttctaccgggggcgcgaagcgatcgatggccagctggtccaggtgattaaaaacttccgcgaaacctatggcctgagcgtcataccggtgtcggttgacggcgtgattaaccccatgctgcccgacagccggacggaccagggccaggctgagcagcttggcgtgaagttcttccccgcgatgatgctggttaacccgaaaagtggccaggtgaagcctctcagttacggctttatcagtcaggacgacctggcgaaacagttcctctatgtctccagcgactttaaaccgaatttctaaggagtgtgtcatgcgaaagattcgttttccggatttagatatcaccgggatgtgggtgctggccgtgggcgtgtttttccacctgatagcccggcttgtcagaaagcagcctgagctggccgtccaggccggggaaatcttcgggctgggaatggtggtgttcgggggataccgcattcttaacgccctcattgctgaagccgaaaaagaggagaaagcctgtgaaaagcatcctgaagaacatcgctaagacgccgctggcggcgctggctctttcccttgctctggccggactggcacaggcgggaacgttcgatgaggtgaagtcgctctgggatccgcggggaatctccggtactgaaacggcttccccgcagagcgacactccccaggtggagagcggggcatctcagccacgctggttacgactcagcaacggaaagcaggtggacctgcgcgactggaaagtggtgctgttcatgcagggacactgtccatactgtcataaatttgacccggtgctgaagcagctggccggacagtatggcttctccgtgttctcttacaccattgacggacagggtgatgacgcgtttcctgaagcgctgccggcgcctcctgacgtgatgcagacctttttccccaatatcccggtggccaccccgaccacgtttctggtcaacgtgaacacgctggcagcgtacccgatcctgcagggcgccacggatgcacagggctttatggccagagtggatacggtatttcagatgatgcactgagtctctgttatatccggtcttagcaagtgattaaggaaaatagccatgaacaaatatatacgttcgacgggactgtatgcgtttttatttccagccagtttaaaagcacccgggcagacagcagcagaaaaaatagaacaactgaagccggaatttgtccaccgggaaaggcgtatggaaatctatctggaattattcattgtgtttctgactgcaggtgccctgctgttatggataatgagatttttatttaatctctgcgtggctgactggatagccagcggtgacctgcgagtaaaagacctgtggaatattatgatgtacgccatcccttatgcgctgatggctgtcgggatggggttctttgttgccggagtgacattagcaatcctcaattttttcagtcatcacctgaaaatcctttttattctgagaaataacagagttaaaaataatgctgtgcgtaatggaggacaggatgcgaattaaacttctgtcactcttctgcggtgccgcgcttggcctgtcatttagtgccgccgccgacgtgaatggcgacatgaaccaattcttcaataagcttggctttgcgtccaataccagccagccgcaggtctggcagggacaggcggcgggttacgcctccggcggttcgctgtatgccagaacgcaggtgaaaacgatccagctggtcagcatgaccctgccggatattaacgccggctgcggcggcatcgatgcgtacctggggtcgttctcatttatcaacagcgagcagctgcagcgcttcggcaaacaaattatgtccaacgccgcgggctacttctttgaccttgccctgcagaccacggttccggagatcaaaactgccaaagacttcctgcagaagatggccagcgacatcaacagcatgaacctcagctcctgccaggccgctcagggcattgtgggcggtctgttcccccgcaaccaggtggcgcagcaaaaggtctgccaggacatcgccggtgagagcaacatttttgcggactgggcggcttcccgtcagggctgttcggtgggggggcagatggacaaagtgcaggataaagccagcgataaggacaaggagcgtgtaatgaagaacatcaacattatgtgggatgccctgtccaaaaaccggctctttgacggcaataaggagctgaaagagtttgtgatgaccctgaccgggacgctgatttttggtgagaacagtgagatcaccccgttgccggcacgcaccactgaccaggatctgattaaagccatgatggagggcggcacggctaaaatctatcactgcaatgattcggataagtgtcttaaggtcgttgctgatgccaccgtgaccatcacctccagtaaggcgctgaaaagccagatttccgctttgttaagcagtatccagaataaagcggtggctgatgaaaaactgacggatcaggagaaagggtttatctccagcaccaccattccggtgttcaaatacctggtcgacccgcagatgctcggtgtgtctaactcacttatttaccagctgacggactatatcggctacgacatcctgctgcagtacattcaggaacttatccagcaggcccgggcgatgatctcaaccggtaattatccccagtcgacaatggatatgatcatggaaaacctcaaccaggcgagtgtccagattgccgctttccagtcccgcgttcaggttcagcaggacgccttgctcgtggtggacagacaaatgagttacatgcgccagcaggtctctgcccgcatgatgacccgctaccagaataactatcattttggggggaatcagtaatgcttgaggtatatgccattgcaggcggtgactggttacggggcaacctgaacgcgattgcggcgtttatggagaccggcacatggtcgaccatagaaaagatgtgtatcgccatctcggtactcattgtggcggggaactgggtaaaaaaacacaacgtgatggaccttttgggctgggtcttttccctcaccctggtctctatgctggttgtcattcgcacccctgtgcagatcatcgattacagtaacgttgcgcaggtctatgaagtcgataatgtacctattggtctggccattccggcgtcgctgacaacgcgggtaggaaacgcgcttatccagagttatgagatggtcttcgcgctgccggacagtgtcacgtacagtaaaacggggatgttatttggcagtaatctggtcgcgaaaagtacggattttttgtcacaaaatcctcagattacgacgctgttttccgattacgtacaaaactgtgtgatgggcgatattttcctcaatcataagtactcttttgaggaattactgaattcacctgatccgtataccctgatttttgcaaacccgagtccactgcgtggcgtgtttgacaaaaacaaccagttccagacatgcgaggaggcctcacgggatctgaaatcggctctcgcgctggatactcagacaggcggtaaaacctggaactactatgttcgtcagctgtttggcggcaaacctaatcccgatctgcttttcagccagatgattggcgacagctacaattacttctacagctcgggacagagcgccgggcagattatccgccagaacgtcacgatgaacgccctgcgcagtgggatccagagttatgcggcccgcagcggggacaccgccagtctggtcaatatggctaacacatcatcccttgaaaagcagcggctggcacaggccacaatggggcaccaggcgcttcgcacacttccgctgatgcagaccgttatcatggggataatgattgggatgttcccgatcatggtgatggccgccatgtttaatatgatgactctgcaggtgctaaaggggtatgtgtttgcgcttatctggctgcagacgtggccattactgttcgccatcctgaacagcgcaatggcctactatgcgaagcaaaatggcgtcccagtcgttctctctgagttgtcgcaggttcagctcaaaaactcggatattgcgaccaccgcgggctatattgccgtgatgataccgcctttgtcgtgggggatcgtgaagagcatgggagcagccttctccagtgcctacagccatttttcttcatcggggctcagtgcaacatcgcaggctgcctccggcgtggtggacggcaattactctttcgccaacatgcagatggagaacgtcagcggctacagctggggtaccaacagtacaaccagtttcggacagatgtcacggcagctggcgaatgggggcatgagcacgcagacgagggatggatcgatggtctgggacagtggtggtgcaatgtcaaaactgccggtggatatcaacgtcggtcgtcagatagccagtgcgcagcaacagatggcccgtgaggctgatgtccaggccgaaagcgcgctgcatggctataacagcagcgtgacaagtgcctggaatagtctgcagcaatttggcaccaataaagggaacagcgcctcaacaacgaccggagctgatactaccgattcttcgcaggactcgatggccagaagcaagatgtggaatgcggttgttgctaatgcgaaagccaacaacatcagtaatgaggagtctttccagcagttgatggatgattcagctaaaagtacgcagggagttgatttatacggatctggtaagtggagttcaggggatcagctgtttggtaagctaggtaaatggggaactgggttatctgctgaggccggagttaaaggcagtgcgggttggacccacagctcgggtaacacagataatgttggcacttccggtcgtgaatcgaatgacagccgacatgataccagtagtcaggcggccaaagactttaaggaagcatccgattactttaccagccgcaaaaccaccacatcgggcaacattaccgataataatgccagctcgcgtgttgaccagtttgccgcgtcactctccagtgccaaaaacagctatgaccagtatacaagcagccggacacgcagccatgagtacagtgagatggcgtcacgcacagagagcatgactggccagatgaacgaaaacctgactcagcagtttgcgaactttgttcagcatcgtgctccacaggatgccgaggccattctgaccaataccagttctcctgaaattgcggcgcagcgtgaagccctggcgcgtgaattcgtcaaagagcaggtagaacccagggttgatgctgcgtatcaacagggtcgtgaaagcattggacagaatatggctggggtgtcaggtggtggtgacaatggatcggtaatggccgactaccgacaaaattctggtcgtatcgatgctatgacgcaagatgcgggtattaaggataatgtggatcagaaagttggtgggatgattacagagaataaacaacagcagcaggaaacccgcgaaaacatacaacggcaaggcgcagaggtgaaaaatgagaatactgaaatggaaaaggaccataaaacaaaagcaaatgagtttaaaggtgattataatgaaagaaagagtaaggtgaaatctttaccaggagctgactcgcctactgagttagaggcaaaagcggcgaaaattcaaaaggattatcttgatggtaaaaggtaaaaatgatgattacgaacaaactacttattgaggaagtggaggagctgaaaaatctactttcacaagggaaggctgaaattccatctttttgggagtgcctttggcctggcgtagtgttagttgcatggaatatgctttgcgctgtaattagtgtggatgctgtttatttgaccggaaagtatatatttcatgttttggtttttcctgtcggggtcagtatcattatgctcctaggtattgccagttcacgctctctctttttgtcagtccctaaaaactttagagaaaaatcgaatatatatcgctttttttctaagaaggtttcgatttatgctgttgtgtacatggcagtgattatgttattagctatttgtaatagagtggtttatgacacgccattttcttttgcatttatggttattttaacgtctgttttttttggttttgtcatgaatctggattttggacgctatcagctatcattgctcacctctgcaataaactctttccgagcggaaaagttgggggggtaatcatccagaagcgacctatcaattatggtggtttattaacagactaaaaatttcttttggttattattatctgtctaggttgttattggtttttacatctcgcttaaaattcgtatatagtgaatgcgcattccgaaatcataagagaatgtgtatttactcgtattgattatgtcacaaggattcaggatgaagcttaataaagtcatggctgtgatggtcgtcagctctgcgctggtgttatctggatgtagtgcaatgggaaccgccattaaaaagagaaatctggaagtaaaaacccagatgagcgaaacaatctggctggaaccttcaaataataagacggtttatctgcaaatcaaaaatacctccgataaggatatgagtggcctgcaggcaaaaattgccagcgccgtcacttcaaagggatatcaggtcgtcagtaacccggatacggcgggctactggatccaggcgaacgtgcttaaggccgataaaatggaccttcgtgagtctcagggctggttaagccggggttatgagggcgctgtgactggcgccgctttaggggcagggattaccgcttacaactccagttctgcgggagcaaccctgggggtaggacttgcagccggtctggtggggatggcggctgatgcgatggtggaagatgtgaactacaccatgatcaccgatgttcagatcgcggaaagaaccaaaactcaggttcagactgataacgtggccgtattacgtcagggaacatccggcgcaaaagtgcagacaagtactgaaacgggtaatcagcacaaataccagactcgcgtcgtctctaacgctaataaagttaacctcaagttccctgaagcccagcctgttcttgaagaccagctggcaaaatcgatcgctaatattctgtaagctttctattccacggcccggtccccgggccatactggcatcacctttctggtgtgtcagaattcattcgtcaaataatctatgaattccagatctgaacggtgaacagttgcgcaatttatttgtgcatctgtgaggcgttgccgccttcggcggaatattttcgtctttatttgatcagaggttatttatggcaatatctgaacctgtcatgtctcttgaaacacataaactgatgcctggcgatatttatccacaccctgctatggggggcttattccctgcaaccccgtgaggtctgttttcgctgattaatttgtccttccgaccctaataatttactgacggattagtgccatgagtttcaatgccaaagatatgacgcagggcggtcagatcgccaatatgcgctttcgcatgtttggtcagattgccaatattattttctacgtgctgtttattttattctgggtactgtgcgggctgatgctgatgtataggcttagctggcaaacctttgtgaacggctgcgtatactggtggtgtacgacgctgggtccgatgcgcgatattattcgttcccagccggtatacaccattcagtattacggccagtcgctggaatatacctcagaacaaatcctggccgataaatatactatctggtgcggagagcagctgtggaccagtttcgtctttgctgccgtggtttctcttgttatctgtatcgtgacgttcttcatcgccagctgggtgctgggccgccaggggaaacagcagagtgaggatgagaataccggcgggcgccagctttccgataagcccaaagaagtggcccgccagatgaagcgtgatggtatggcctccgatattaaaattggcgatctgcctattcttaaaaactccgaaatccagaacttctgcctccacggtaccgtaggctccggtaaatcagaagtgatccgccggctactgaactacgtgcgtgcacgtggcgatatggccatcatttatgatcgctcctgtgagttcgtcaaaagctattacgacccgtcactggataaaatcctcaacccgctggactcgcgctgcgcggcctgggatttgtggaaagagtgcctgacgctgccggacttcgacaacatctccaacacccttatcccgatgggtaccaaagaagacccgttctggcagggctccggtcgcactatctttgccgaaggcgcgtatctgatgcgcgaagacgacgatcgcagctacgagaagctggtcgataccatgctgtccattaaaatcgacaagctgcgcgcctatctgcagaacacgccggcagcgaatctggttgaagagaaaattgagaaaaccgccatctccattcgtgccgtgctgaccaactacgttaaggctattcgctacctgcagggcatcgagaagaacggggagccgttcactattcgggactggatgcgcggtgtccgtgaggacagacccaatggctggctgtttatctcctccaacgctgacacccatgcttccctgaagccggttatctcgatgtggctgtcaattgccatccgcggcctgctggcgatgggtgagaaccgtaaccggcgcgtgtggatattcgccgacgagctccccacgctgcacaagctgcctgacctggtcgaaatcctccctgaggcgcgtaaatttggtggttgttatgtgttcggtattcagtcctatgcccagctggaagatatctatggcgtcaagcctgccgccacgctctttgacgtaatgaatacccgggccttcttccgttcacccagcagggagatcgcggagtttgctgccggtgaaattggcgagaaggaaatcctcaaagccagcgagcagtactcttacggtgctgacccggtgcgtgatggtgtatcgaccgggaaagaaaaagagcgggaaaccctggtcagttactccgatattcagacgctgccggacctgtcctgttacgtcacgctgcccggaccgtatccggccgtgaagctggccctcaaatacaagccgcgtccgaaaattgccgagggatttattcagcgccgactcgatacgcgtgttgacgcccgcctcagtgcgctgcttgaagcgcgtgaatctgaaggcagtcttgccaggacgctttttatgccggatgcgccggcatccgggcccgcggatacaaacagtcacgccggtgaacaacctgagccgatcagtcagcctgcgccagcagacatgacagtatctccggcaccggtaaaagcgccgccgacaacaaagagtccggcagcggaaccttccgtcagagcaacggagcctcccgtcctgcgggtcacgaccgtaccgttgatcaaaccaaaagcagccgcagcggccactgctgcctcaacagcatcctctgccggtgcccctgcagcagctgcaggcgggacagaacaggaactggcgcagcagtccgcagagcaggggcaggacatgcttccggccggcatgaacgaggacggtgtgattgaagatatgcaggcgtatgacgcctgggcagatgagcagacacagcgggatatgcagcggcgtgaggaagtcaatatcaaccacagccaccgccacgatgagcaggatgatgtcgagattggggggaacttctgatgcttagtttcagccaggttaaatcagctggcagtgccggtaattactatacggacaaggataattactacgttatcgggagtatggacgagcgctggcagggtaaaggcgcggaagcgcttggtcttgaaggaaaggtggacaagcaggtcttcacggagcttctgcagggaaaactacctgatggcagcgacctgacccggatacaggatggcgtgaataaacaccggcccggttacgatctgaccttctcggcccccaaaagtgtatcgatgctggctatgctgggcggcgataagcgtcttatcgatgctcataatcgcgcggtgacagtggctcttaaccaggtggagtcccttgcctccacacgggtaaagagagatggcgtttctgaaacggtcctgaccgggaatctgattattgcccgctttaaccacgatacatcgcgcgctcaggacccacagatacacacgcacagcgtggttatcaatgcgacacagaacggcgataaatggcagacgctggccagcgataccgtcggtaaaaccgggttttccgaaaccatactggccaaccgcatcgcattcggaaagatataccagaactctctcagggccgatgttgagtctatgggttacaagacagtggatgcgggtaagaatggcatgtgggagatggagggcgtgccggttgagtggttttccacgcgcagtcaggagctccgggaggctgcaggacccgatgcctccctgaagtcccgggatgtggccgcgctcgatacccgcaagtcgaaagaagccatcgatccggcagagaagatggtggagtggatgaacacgctgaaggagaccgggtttgacatccgggggtaccgtgaggccgccgatgcgcgggccgcagagctggcccgtgcacctgccgcgccggtgaacactgacggtccggatatcacggatgtggtgacgaaagcgattgccggtctcagcgaccgcaaggtgcagttcacgtatgccgacctgctggcacgcacggtcggccagctggaggcgaaggacggtgtctttgagctggcgagaaagggcatcgatgccgccattgaacgggagcagcttatccctctcgatcgcgagaaaggcctgttcacctcaaacatccacgttctcgatgaactcgccgtcaaagccctgagtcaggaggtgcagcgccagaatcatgtctctgtcacgcccgatgcgtctgtggtgcgccaggtccctttcagcgatgccgtcagcgtgctggcgcaggatcgcccggtcataggtatcgtttccggtcagggcggtgcaaccggccagcgggagcgggtggccgagttaaccctgatggcccgggagcaggggcgtgacgtccatatcctggcggccgataaccgttcacgagattttctcgccggtgatgtgcgtctggccggggaaacggtgaccggtaaatccgccctgcaggacgggacggcgtttattccgggcggaacactcatcgtggatcaggcggagaagctgagcctgaaggaaacgatttccctgcttgatggcgcgatgcgccataacgtgcaggtcctgctctccgacagcgggaagcgcagcgggaccggcagcgcgctgacggtgctgaaggacagcggcgtgaatacgtatcgctggcagggtggccatcagaccaccgccgacatcatcagtgaaccggataaaggagcacgctacagccggctggcacaggagtttgccgtcagcgtgcgtgaagggcaggaaagcgtggcccaaatcagcgggacgcgtgaacagagcgtactcaacggcctcatccgagactccctcagacaggagggggtgctgggtgagaaagacacgaccattacagccctgacgccggtgtggctggacagcaaaagccggggcgtgcgggattattaccgggaggggatggtgatggaacgctgggatccggagacccggacgcacgatcgctttgtcattgaccgggtgaccgcgagcagcaatatgctgaccctgaaagaccgggaaggggaccgtcttgatctgaaggtttccgcggtcgacagccagtggacgctgttccgggcagatacactgccggtggcagagggggaacgtctggcggtgctcgggaagataccggacacacgccttaagggcggggagagcgtcacagtgatgaacgtggaggacgggcagctgacggtacagcggccggggcagaaaaccacgcagaccctggccgtgggtgcgggcgtgtttgacggtattaaagtcggccacggctgggtggaaagtcccggcaggtcggttagcgagacggcaacggtctttgcgtcggtgacgcagcgtgagctggataacgccaccctcaaccagctggcacagagcggaagtcacctccggttgtactcggcgcaggatgcggcgcgcacgacggagaagctgtcgcggcataccgcgtttagcgtggtctcagagcagctgaagtcccgatccggcgagacggatctggatgcggccattgcgcagcagaaggccgggctgcataccccggcagaacaggccattcacctggccatcccgctgcttgagagccaggacctgaccttctcccggccccagctgctggcgacggcaatggaaaccgggggcgggaaggtttcgatggcggacatcgacacgaccatccaggcacaaatcaggtcggggcagttgctgaatgtaccggtggcacccgggcgtggcaatgacctgctgatatcccgtcaggcctgggacgccgagaaaagcatcctgacccgggtgctggaaggtaaagacgcggtggcccccctgatggaccgcgtgccggacagtctgatgacggaactgaccgccggacagcgggcggcgacccggatgattctggagagcacggaccggttcacggtggttcaggggtatgccggggtggggaaaaccacccagttccgggcagtcatgagtgccatcagtctgctgccggaagagacccgcccgcgcgtcatcggtctggcgccgacgcatcgcgcggtcggggaaatgcagagtgccggcgtggatgcgcgcacgacggcgtcgttcctccacgacacgcagctgctgcagcgcaatgggcagacacccgatttcagcaacaccctgttcctgctcgacgagagctcgatggtggggctggccgatatggcaaaagcccactccctcatcgccgccggcggtggacgggcggtgcccagcggggataccgaccagctgccgcccatcgcgtcgggccagccgttcaggctgacgcagcagcgcagcgccgccgacgttgccatcatgaaagagattgtgcgccaggtacctgagctgcgaccggcggtctacagcctgattgagcgggatgtgcaccgcgccctgaccaccattgagcaggtcacgccggagcaggtgccgagaaaagaaggcgcctgggcgccgggcagttctgtggtggaattcacacagaagcaggaaaaggagatagaaaaggcactgagcgaggggaaaaccctgccggaaggtcagcccgcgacgctctacgaggcgctggtgaaggactataccggacggaccccggaggcacagtcgcagactctggtgatcacccatctgaataaggaccggcgggcgctgaacagtctgatccatgacgcacggcgggagaacggggaaaccggcaaagaggaaatcaccctgccggtgctggtcacgagtaacatccgtgacggtgaactgcgcaaactgtcgacctggacggctcacaaggaggcggtggcgctggttgataacgtataccaccgtatcagcaaagtggataaggataatcagctgatcaccctgacagacagtgaaggaaaggagcgatttatctcaccccgggaggcatcggcagaaggcgtcacgctctatcgtcaggaaaagatcaccgtgtctcagggggaccgaatgcgcttcagcaaaagtgacccggagcgcggctatgtggccaacagtatctgggaagtgcagtctgtttcgggtgacagtgtcacgctgtctgatggcaaaatcacccgtacgctgaccccgaaggcggagcaggcacagcagcatatcgacctcgcctacgccatcaccgcccacggcgcccagggggccagcgagccgtatgccatcgcgctggaaggggtggccggtggccgggaacagatggccagctttgagtctgcctatgtggctttatcccgcatgaaacagcatgttcaggtctacaccgacaaccgtgagggctggataaaggccatcaagaattcacctgagaaagcgacggcgcacgatattcttgaaccccgtaacgaccgggcggtgaaaacagccgatctgctgttcgggcgggcaaggccactggatgaaaccgccgcgggccgggcagccctgcagcagtccggtctggcacagggaagttcaccaggaaaattcatttctccggggaaaaagtaccctcagccgcatgtggcgctgccggcatttgataaaaacgggaaagccgccggtatctggctcagcccgctgaccgatcgggacggacggctggaggctatcggcggagagggacgaattatgggcaatgaagacgcccggttcgtggcgctgcagaacagccgcaacggagaaagcctgctggccgggaatatgggggagggcgtcagaatggcccgcgacaatcccgataccggggtggtggtgcggctggccggtgatgaccgcccctggaaccccggggccatgaccggcgggcgggtatgggctgatccggcgccggtgggtccggtaccgcaggccggggctgacattatcctcccgccagaggttctggcgcagcgggcggcagaagaacagcagcgccgcgaaatggaaaaacaggcggaacagactgcccgggaagtggccggggaggcgcgtaaagccggcgagccggcggaccgggtgaaagaggttatcggggacgtcattcgcggactggagcgtgaccggccgggtacggagaaaacgacgctaccggatgatcctcagttccggcgccaggaggcggcgattcagcaggtggcctcagaaactctgcagcgtgagcgtttgcaggctgtggagcgggacatggtgcgtgacctgaaccgcgagaaaaccctcgggggcgactgacgcgcctgcggcttgtctgccccggcagggcctccggttaacaccggacaccctgccggggtgcggaaaaaagagagaaggatacagagatgacagcacacacaatgggtttcagagccgctgaccgctggctgcaggcattactgacctggacaccgggtcagacggatatgattaaaacggtggccctggtcctgatggtcaccgaccatgccgggttactgctggcacacaataacgagataatgcggcttctgggacggggctgttttccgctgttcggtctggcatggggaatgaatctggcacggcacgcggaaatacgccagtcgcagctcaacagcctgtgggtctgggcgctggttgcccaggtgtcgtttatgctcatcgggtacccgtggtataccgggaatattctgtttgcctttgccgtcacgggccaggtcctgcggtgggtcagccagccgtcctggtattacaccctcccggcggctggactgctggtcgcctggatacccctgtcaaccgccagctacggcatggccggagtgggtatgctcaccgccagctggctgctttgtcgcgcacagcatgcaccggaacggctgggatacggtgtgctgtgggccctcatggtgttgctgatgaatatgaatgacgtgagtgaatcagtggccgggctggcgattgcgctgctgacgctgatggtgtgctcatctgccggagagcgtgtgaaacgcttctggccgcggcagttcttcgtgatgttctatgcggtgcacctggcggtactgggtattgtcgtctcaatgtgaaaccaagagcaggaaagggcgatgtcgttcaggtatagtagctcttattagctgaacgataggcaattgttatggcagaagaaaaacgccctgtactgagcctgaaacgaaaaccggcggagaacagtacgacccccgcagaggcgacccctgctcctggtgtggtgcgccgtaagaaggtcgtggtggtctcgtccccgccggcctggaaggcaaagaaagcgaaacttgagaaggttaaacaagtggccgaagccgccgcgcgcaacactgcgccggcgccggttaaagcggtaaagacgccacctccggtgcgttatcttcgcctgctgccgccggaacaggccattatgacgctgaaggctttctggccacagctgttcgacggaaactccccccgtctgctggtaacgggcatgcgcgaacagctgtttgccgatattgtgaagcgcgacctgccgctgtcgcataaacaggtgatcaagtgcctgaagagtctgacccggtctgcgggctatctgtcccggatgaaggtgggggcctcccgctatgatctgcaggggaatgccgtcgcgaccgtcaccgcagaggaagcgcagtacgccagtgagcgcatgatgaaagaactcctgcgaacggagcgtatgcggagccagtctgctgactgaatacaatcggggagaggaaatggattttgaagcgcggaaacaaaaggcgctggcgataatggccagccgtaagatgtggaaaagcaattatgcaccgcttctgatacgcctgctgtggcggctggggataaagattccccctctgccgtttgctccgctctggcaggtttttggcgtgatgacagcctctttctccgtcggatacgggctgtggatgtactggatggtgtggcgggcccaggggatgtcccccctgttcgcttgtaaaatcagtcttatcgccggcgtgttatttggcctgacgatggcgttgtttcatctgtggcgccgaaaggtgaataaattacctgactggaaagatttataacggaatcagaagaacgccggaaacaggacttaccctggctgaatggcatgaattttcgcgctatgcacttgcgtgcatactcatgcatgccgtaaaaacagagcctgcgcgtttctggcgggttttcgggtggtttgttgcctgttttaccggttttccgtcagaaacgccctgaggccgttttagcggtgcgtacaattaagggattatggtaaatggtgacttggttaatcataaacatcctgggggatggcatacaccagctggatatccggtgcatcgttgagccatcgacctgattttttcatcaggtagccaccaatttcttcggtagtcagccgagcatgaaacaatgcttcatcattgaaccagcagtcagggtgatagatgagatccagtgggtttgccctgaaattaatctccagtaactggagtgcatagctgtggtcagatgcactaccttctgctttgcgtataaagttgataacgtcgttcagttctgtccatgtaaagtcatcaaggtatttttcctgattaagcgccatcctggtgaaatctagtgcacttgtccaggatgaaaaatcacgaaaatcagagaacccgcagggcatgacgacctgtgcattccagtctgccatcatctgttttagttcttcattgttttcgtccatcccgttatcgatgtgatcgagaatgccattcagctgactgaccagttctttcatctgtttacgggtgacccgtgcgggtttcattcgctcaggtaatggcatcagaaatactctcttttttatcgtgcactcgggggaactaagtaatctatcgggctatgaatcagagctcaaatcgttttttttttctttctgatgatccgcattcagcgcttttgtggctgtaggcccatcagaagcagaaaaagctgcacgagcggagaaggtagctaaggaaaaacagcaagcagaagaggctgcaaaagcattcgcagcgaaaacagcagcggcatccgccgctgcggaaaaagaacgtcagaatgcgatttctgctgcggctgctgcaggtcaacatcaaactgttcctgatgcgcgtaataatctgaatcaggcgactgctgaagcatcacgcctgaaaacagtggcagataatgcccttaatacagcgaagaataagcgaaaggaagctatcgatgccgtaccagtagcaactcaggctgagaaaaaatatcaggatctgcagcaaagcattaaaggcctcacgctgaataataacggccaatacggtacccaaaaatgggaggttatcagttcgaataaagagcatgaccactggggataccggttctatccatctgggatcacaaaagctcaggttgatgcagcgcagaatgatgcggtgaacaaacgaaatgctgcctccagtcttgccagccaggcaacggccgctgagcaggccagtctgcaggcatcagctgcctataatgctgcagaaacgcgccgtcaggctgcccaggttgcattagcgtccgcagaacaagccgccgctgcggcagaaaaaaacgacaggctgatgcagcagcgaaagccgctgaggaggccagaaccattgccgaaaaagcaaaagcgctgctggcccgtcgtacagccgcagataaactgaaatcttcagagattcaggctgtcaggggtatcccggctacagcggcaccttttgctattcctctgacctggtcaactgcgtcacgtggaggttttactctgtcggctgatgctgcggccagcctgggagctttcatcagcgaggctctggcgacgttacgtgtcgctgtggtggctaacccggtagcattaaccattgccggtcttgtgttatcgaaatcagttggcgtcggtagtgatatggtgcccggtcgggatatcagttcgatgatgcctggcgatgcgtttagtctgcctgataccgcggcattgaataaagcagcagatcagaaaacatctgtcagtatgccggttcgtggccgtctggttatgaatgatagcggcattctggatgttcagctggtcaaaaccaatactgccggtgccgtgaaggtcgctcgtgctgtactggataaggaaaccggctactggggctatactcttcccgttgtcgcagatgttccggcgcaaactatttttgtcagcccggctgacgcacctggtgcaaacggaccactgacgctaagcgggccggtaccactaccggagcgtattctgcataccggtgatcagatttcggcgccacaggctacagataaaaccgtgacgccggtagcggatgacctcgattttgaagatattattctggtgtttccaccggagtccggcctaaaaccgctgtatatgatgtaccgtagccctcgtaacatgcccggtacagtaagcggcaaagggcagaacgttggcaataactggatggggggggccagtaccggggatggtgctcctgttccttcccagattgcggataaattacgcgggaagactttcggtagttttgattctttccgtcgggcgttctggaaagcggttgctgacgattctgcactaagcaagcaatttagtgaagctgatattaatcagatgaaagctggaagggcacctactgcggactttttagaatcagtagggaaacgtgttaaaattgaattacaccacgaaaaagaaatatctcaaggaggggctgttatggatgtcgataacattaaggcgctaacacctaaaaatcatattgagacacataaaggaaaataaaatggctggtaataaaatttcagattttacggaagaagaatttactgcttttgttagtaaaataatcgctgctgattttcaaactgacaaagagaacgatgatgctatttattcgttcgcccaactaacagagcatcctgctggttggaacctcatcttcaagcctaaggtaggcgaagattcttcggcgaaaggaattgttaaaaccgtaaaggaatggcgagctgctaacggtaagccaggttttaaaaaatcgtgattgaatgtgcgggttcaggtgatgaatccgcacatttttaactctggatttgaagaataattactagatatccattattttttcctgtctccaaactgaccccatgatggatggtttatggctctgtccaagataccggcgacggacccgtctgctactggtttcggcataccacaaaatcctgacgcctccgcatggcgtcgttgtccaaccccgggaacggggaaaagccagtttcccccgctcccggcgtttcttaaacacccgttaaggaaatactgtgaaaaaaatgaaccgtacgctccgcagatgttgtctgtccgggcttatcagcctgtctttgtttgcaccttttccggttgtgtatgccgacagcatcgagacgggatattcgccggaaggaacggctctgcagctggtcctgaagactattaattctgcacagcaggaaatccggctgatgggctattcctttacctcacccgaagtcgccggcgcgcttgtcagggcaaagcggcgtggcgtcgatgtgaaagtggttctggactggaaagccaataccggcaagcaaaaccaggcgagtctggcggccatgaatcttctggtcaatgccggcatcccggttcgcacagtgtcgcagtacaaaattatgcatgacaaagtcatcattgctgatggccgcaatattgaagtcgggtcttttaactacacccgctccgccgatcgggtcaattcagagaacgtgctagtcgtgtgggatgttccagtcgttgctcaacgctatctgcagcactggtcgacccgctggtcgcagggaacggactggaaacgggcttattaacgcacctcagccataaaacgagcatcaatacggttcacttacgtccatgctaaagcgcctgaaccacccgtcgctcgtatcttacctcttaagtcttgcccctgaaggtactcatttttagttcaggatggggctactctccatctctcttacaagaggacatgggcatctcatttagttgaaatttgtacgccaatacaaatgacaatcttagaaaggatctcttgcaaattgaaagtaagttattgatttgcaggatctgagagttctgtagtatcctccgttccgaagacatttctgaggtgtcaggagagcgataaatgtcacgtccagcagataaaacaacttcctctgcgaatgcaaaacgtgcataccggaaaggtaagccaatgtctgccagtgagagacagcttgccgcgattgcgcggaaacgcgaaacgcataaagaagttaaggtttttgttaaaaacccactaaaggacgtgatgatagcggtttgtgaagaagaaggtctgacacaagcccagtttatcgagaggctccttgagcgagagcttacagaacgcggtcttttagatgtaaagacttcacattcttgatcatgtttatattgagtgctagattgttgatggtctgaataattttgggtgtgccacgccgtaaggtggcagggaactggttctgatgaggtatctacccgggaccagaaaagcaaaaaccccgataatcttcttcaatcttggcggaacgaaaagattaacggggccttcataaactgcatagaacgtgttgctctatgcagggagtatatgtacatgctcagaaaacttcaagatcagtttctgtgtcattcgctccttccgtgcaacataagcgcaggaagcggtgactgatatccttcaaaaccactattcacaagttaaaaacccgaacccggttttcacgccgcgagaagggaaaaagaccctgccgttctgccgtaagctgatggcgaaagccgaaggcttcacgtcccgttttgatttttccattcatgtggcgtttttgcgttcgctgggtaagcggcacaggatgccaccactgttgcgccggcgtgcaattgacgcgctactgcaggcaatgtgttttcactatgatccactggccaatcgcgtgcagcgctcgattaccaatatggccatcgagtgtggactggccaccgagtccaggagcggcaacctgtcagtcagccgtgccacccgggcgctgaagtttctggcggagctggggctcatcacctatcagacggaatatgacccgcagatcggctgtaacatcccgaccgatatcaccttcaccccggctctgttttccgcgcttgacgtttctgaggtggctgtggtggccgcgcgccgcagccgtgtggagtgggaaaacctgcagcgcaaaaagcagaaactgaaaccgctggagatggacgagctgatcgcaaaagcgtggcggttcgtgcgtgagcgttttcgctgctatcaggctgagcgtaaatctcacggccggaagcgggatactgcacggcgggatgcatcacggcagcgtcatgacatcgagacgcgcgtgcgtcagcaactgacccgcgaatacgccaccggacgcttcaggggagataaagaagcgctgaagcgtgaggttgagcgccgtgtgcaggagcgcatgctgctgtcgcgcgggaacaactacacgcgactggccactgtgcccatataacattaccttccttaaaaaatccggccggcgccggaggctttcgctcgcctgttgcccggctactacgtattatcttatcttcaggcctgcattcctcaccataattccggtcttcctggcgtcaacgtggccttaaatgttatcgccggcgtcacttctgacggccgatttctgttatccacatataactgcaagggagtatttcattaggctacaaccgtgatacgcacaaagcacatgccgtcggactttcaaggcgcgtggttccttttaaacaccagctctgtacctcttttaaagatcctttaataaatcctgtaaacacataacctgttcatcgcctgccctgtggacaggctcctgagaatggccgcccttgcagcgacctgacggtcgcgccggttcggtaacaccagtgagagctcccatcgcttcgcgacgggccccggccggagaattaaattagttacagcattcaaaaggaaatccatcataaaaccggcgccggtttgccagccaggagcccctccccaccactgaaaagcgccgccgcccccggccgaaggccgggagtagtgtcgcttttaatgatgggtgttgtaactactcttcttcatcgctgtaggtggagctgcggtcagttgtctggtacacgctcgtaagcggccctccggcccgctaacgcggagatacgccccgactgcggctaacgccttgccgggaccactccgaccgcgtacagaggctcctgagacgttttgagcgggtatggctttgcagctaccgtgttaagtttcctggtgtcgctgaaatagttgatgaacatccccctaagcgtcagcagcaagctgccgccgctaaggccccggaaatcacgccctttacgtcgtaaacgccgtaaagcccgctcaccggggttaaaagggattactttgacttcttcattgctgttagatggttaaggctaatcagggcagggggtagggtggcagaatttatagcccggtaaccggctacgccgggctttcggcgccatttgacgccacagacacatgtaacctcatctggcgcctccatgccgctgacgcggcatccagaagtttcccgatgctgtaagtcttaacgtctgctttgtgccaaaggcggaagtaactaacagcagtctgtgtgaaaatacggggagcaggtcagtcagagtgtaccgcagaagtctacttttcaaacgtacattttaataagtagaaaagttattgagtccagtctctgttgcctatatctttaacaaagataaaacatttgaattatctgttaaatgatatggctatcagacatgatgatctgagggcggtagcattccaaaaacaagagcagaagaggcggaagttcaagttgagcatgggcaaaacgatttcaagaaaaaaacgtctatctcagtactatacaaaccgggatgtggcagagttgcttatctcatcattaccatcagacgaagcaagtacaatcattgacttaagtgctggtgaaggctcgttgttgatgacagctgcgctcaaatacgacaacgcaaagctctacggaattgatattgatgatgaaaactgcagaaagttagacctattacaaaacacgacgagtatatgtttagatgcaacccattcagccagttttgataaaataaaggcacaaaacagtacatatggcatagtcattggcaatcctcctttttatacagctgaacatactgcctatacaaggttcttatttaaggagtgggcactaaatcataaaacaaaatattacagagctgaggttttgttcttaatgttatcgcttaagttgcttgatcgagacagttgttgtggaattgttgtacctgatacgatattttcaagcgagaaatataaaccactcagagaaaaaannnnnnnnnnnnnnnnnnatatagatgttatagaattagataataaggcatttttgggaactgaagcaaggactcatattctcactgtcagtaacaaaaaatcaataagcccatcaataacaacaagaagttcaaaaaaaaataaagcgataaggcttaaaaaagaagagtttattgaaagggccgaccatcaatataactcttttaaatataacaataacgaaaaaacgattgaaacttcaggtataaaagttatgagagggaatatcagcaaaacgaaaaaaactcaactgcatgatgcgataatccattcatcttctttttataatgatttttctttatttgaaaataacaatgacagtgcagaaaatggttcagccgtacaggcggtgaaaggagatgttgttgtaccccgtgtaggaacaagatgtttggggaaagttgggatcatacgaaacggttctttttccattacagattgtgtttttgttatcaaagcttctgagtacgaatgtggtgaaatggttgccgcggcattaaaatcgaaattwggagtcgactggattaaaagtatttcgaaaggcattggagcgcagtacataacattaaatgacataaaaaaactacccctgcgataataacatcatgaaaatagatcatattacagcaagagatactgaagcgattattgaacaatccaaaaaattaatcaagattggttactgggataatgtaaaagtatcagtactgcaacgctggttagataatttcaaggatgaaaaggaaaaatatcttgcagcctctgtgttaagcgagttgatatatcgtaacagagaaactgttacatctatgggctataatatattctcaattattctcccacagatcttagaggagttagatatttaccatattgaggatattgaaaaatggatgaatgacatcaactcgccaaaacatgcaaggaatcttccgtttcgaacgtccgtaataaataatgtggatagtaaagtcactaaaagtggtgatgtaatacacacattcctacaaagagattttttcgataaaaacttaggggtaaaagttgaaaatatagaaaaattgccaccaagaatcaaagcgatagttttttttgatgatatgcttggttctggcactcaaattgacactttcatgaaagaaacaaatcttgatgaacttggaaagaaaataatattcattccatttgcggctctacgcgattcaacaataaggatacaatctaaatataaaaacctaattattaggcctgttgagtacttggatgaaaatcatagtttcnnnnnnnnnnnnnnnnnnnnnnnnnnnnnnnnnnnnnnnnnnnnnnnnnnnnnnnnnnnnnnnnnnnnnnnnnnnnnnnnnnnnnnnnnnnnnnnnnnnnnnncattagggttcggtaatttggggcttagttatgtcttggcaaactcaactccaaataataatctttcattcctctggtttgaaaatgaaggatggaataggttattcaaaaggtaaaatatgaaatttaacgagattttttcgaaaaaccgtgccgaagaattacctgatgatctctatggtaaatatgttcttcccttagggtacgaagatgtaaatctaaaaaaaacgacaaaagcaagtatagttattggggggagaggatatggaaaaacgatgttcttaaagtatcattgccaccagacagctctaagtgtgaataaagatacgattggtattgaggatctttccaatctgggtatatattggcgcccggatacatcctttagccagttattaaccgaagcttggctcggaaaattttggtcaacagctttcaaaacgtacatgagtctatcgctgattattgagtttgttaaactaaccaataatttattgtccgaaaaatctcctgttttttcgttgaaagagaagattaataatctgaaattgccagatacaatttctgaaggtttgggcattgataaaaatgcgaaacttgttgatgttagcgatcttttacatgaaagactgtttactctttgcaattggataaatgccccagttactgaaacaccaccgttttctcttgatacaaaattttcattacagaatatcattagcaaactacatgcaataactggatgcattataaagcctaattttcaagtttacattgacgagttcgagaacttgacatcagaccagcaggcaataatcaatactttaatgaagcacggatccatgccgttactgttcagtgttgcctataagaaaaatgctaatatttcacataaaacgttaggcaacgaaagcattgttgagcagcatgatttcagatatatagacttagaagaactgtatctcaatgactttgatacatttgctggtgagatattagccctgcgcttttcagattatatagaaaacactgatcatgaaaaactccgttccatatttacgtcagaacatcaaatccnnnnnnnnnnnnnnnnnnnnnnnnnnnnnnnnnnnnnnnnnnnnnnnnnnnnnnnnnnnnnnnnnnnnnnnnnnnnnnnnnnnnnnnnnnnnnnnnnnnnnnnnnnnnnnnnnnnnnnnnnnnnnnnnnnnnnnnnnnnnnnnnnnnnnnnnnnnnnnnnnnnnnnnnnnnnnnnnnnnnnnnnnnnnnnnnnnnnnnnnnnnnnnnnnnnnnnnnnnnnnnnnnnnnnnnnnnnnnnnnnnnnnnnnnnnnnnnnnnnnnnnnnnnnnnnnnnnnnnnnnnnnnnnnnnnnnnnnnnnnnnnnnnnnnnnnnnnnnnnnnnnnnnnnnnnnnnnnnnnnnnnnnnnnnnnnnnnnnnnnnnnnnnnnnnnnnaatctgcccactgtacgctggctataaacagtttgtatatttatcaagagggaacatcagacattttctggagttatgtcaccagtcggtaacaaaaacaaatatcacgtctccactgccgccaaaaacgataccatccatgacaatcgaagctcaattagaggccaccctgaagacgagtgaactcgaaattgaaaaaataggagattttggtgctcatggaatgcatctaaaaagagtggctaaaagacttggtgcgattttcaactattgccaatctcgacgttctcagagcgaatcagaagtaaaccatttcactttagatttaactgatataaatcttcttgcttataatgttaaggaaatcctaaatgaatcattggtgtggtccgtgctgattgaacagaaaggaacgaagagtaaatcaactgacaacctggaactcaatgattacgtcttacatccagttcttgcaccatattttggaataagccacagaaaaaagaaaaaaataaaatttagcaaaggtgaggttgaaaccatttttgtaggtagtgatgaagatttttcatccttgttaaagaaatatggagcccggtgggatatcgatgactcatcttttgatgtttctagttcagtcacatcataccagttgggcctgttatgataaaattcaaacgtatcagaactcacaacaacttagattttactaatcgccatcatgacatttttttctatggtgaagagttagatgagagaactggcctggcgataaaaaaagtaaacgcaagcaatgcatttcaggttaaatatgtaaaagatgaatatgcattaaaactcaatggtaataaatacaaattgttagcattgaaggatgcattaatctctatgtcgcctaaaaaagtaataatagactctacttctcttgatttccctgaaatattgtatcttttttactccattaatatgattgaaggtatagaatcatttactgttctctacattgaaccgaaagaatacagtaagtcgccttcgactgagggcggggatgaggagtatcaattaagcgatggccgacagccattttcttctcttcccgtattttcactgaatacaatcacatctggcttacaaaaaaccagcctggtttcattcttaggatttgaaaactctcgtctaggccagattttaagtaatgatgatggggcaagcttcaataaattactggcttgtatatcagtcccagcttatatcccaggctgggagaacaaatcactcagaaagcatttattacatttcgacagcatggagacagatctaagaacctgtcctggtgcaaacccttacgccgtatatcagaccttattagatatatatgcagaaaacccaagactggtgctgacatccttaggtacaaagcctacggctatcggtatctgcgttttcttaattaacaatcatccaaataatagcgttgaaaaacaattgggagcaatatatgactatcctataaaatccatcaaccgtacaattggaattggtgagatttactcctacgaactatcaataagctaacgtcccgcctacgttcatacgtttgaagtgttcggtaccaccggctctgtgacagttcaagctcatcatcaaaatcttcggctacaggcctagttttattgtggagagtaattacggtgattgaataagtcgtgaaaattggcaacctccattcggcttgttccaactgatgcagagccgggctattgatccactcaaagagatggctcatgcatcagttgtattgttgtaaagccacaccgtcatattgtatttgaaaagaaaacgctttagtcaatcccagccttaataactgtttgatgttcaatataacgttctatacttgaaaagnnnnnnnnnnnnnnnnnnnnnnnnnnnnatactggtatgtataacacgaagtcgaatgagtaaggtattttttgtgtgggatttattcattaagataatgctgctgttaccgattcccttgataactgtttttcccaacattattccttttctgacttatagacaaaatggtgataaaaacaaatccgccctgatggatacactagcccgagagatggataaacaacaaccctgtgcgtatcttgtggagtcatgcgtttctcgaccgcataacatccggccaataccttgggcgtttctgcgggtggtactacattacagtaattcgatggaaatcattcagctagtatcatctgggaggagaatactggcactgttgcaaatataggcttggagggagatggtaaatgttggcttcaccgggagcgaaacgacggtcagggatgttgtggctaagtggcgtaagcaggttaacagtcccgttatcgccccagttcgactcccctcagcatccagggtaagccgctggttaatgccctggcgaatgatcagaggagaagaaaactatgcatcccgcttcatcgaatcgatgtgccagaaagaaccgcaactgaaaatggcgcaacagctgtcgctcgacttctatcgaatgctgaaaacgaagaataaatcgcagttaaatcaatcgttcactgacgtaagtcaaagtgggctcattgaccttcagcgtgttgcggccagtatggaagcggatgcaacagcaatacacgaagcgataagcagcagatggagtaatggcgttgtggaaggccatgtaaaccgcctgaagatgctgaaacgacagatgtacggtcgagctggcttcgagttacttcgacgacgagtcatgagccctctggcttaaacaactccacctaagttgcggaagacccagttttgcaccgttggtaacaatgatgatatcttggacatgatcggatggatgagccctgaccggaaaaccaattttctgagtcattctgcgaatctgcgattttatgcattgtgctctgtggaagggttgaatagctatatagccccggaaaaaattaaggcgcagataaaggtttcacgtggtggaaaaggtatcagcaggttaatcagggtgctcgggaaaaatgagttcatccgaattgtgaaagatagccagacggtactcactatcggcatggacaattccattgcgactggctaggtcaattcatcgccgttgctgtcattaattccgggtttagcacaagagttgtttattagtttaaatattaataactggatgataattagatgaataatatcgagataattgaatcaggatacaatgcgttatgtgatgcttataataattccgttatcagtcttaagcgctcctccctatatgaagatttactagtccatatggatattcctgaaaaaaacaggagccgattcacttatgctactttgaatgatcgcgacgaaataatcgcaatatgtgtgtttattgtctctcttgatgagggaacaactgatgtaggatggtttgttagagcggactttagaggtaaaggggttggtagagatacagtagaaaaggcattcaacgagtttaagaatggtctcaagggggctggagttgaggctatttttattggcgccactgttgataatggtaatactccttcaatttcattggggcagaggtttataggcggagaagaaataatagaaaaagaagacgggactaccatctactcatacctcaatcgtttcacgctttagttaatgggagagggtcaatggaaagagtgagtacctatgtcatggggtagtgaccgggtagctgcgataactgccaacttttcatccctccaccttcacgcacaaacgaacgtatatgtgacaggtacgacatgctgataggctacatgcgggtatcgaaggcggacggctcccaggctaccgatttgcagcgcgacgcgctgattgccgccggggtcgatccagtacatctttacgaggaccaggcatccggcatgcgcgaggatcggcccggcttgacgagctgcctgaaggcgttgcgaactggcgacacactggtcgtgtggaaactggatcggctcggacgcgacctgcgacatctcatcaacaccgtgcacgacctgactgggcgcggcatcggcttgaaggtattaaccgggcacggcgcggccatcgacaccacgaccgccgccggcaagctggtctttggcatcttcgccgccctggccgagttcgagcgcgagttgatcgcggagcgcacgattgccggcctagcctcggcccgcgcgcgcgggcggaaaggcggccggccgttcaagatgaccgccgccaagctgcggctggcgatggcggcaatgggtcagccagagaccaaggtcggcgacctgtgccaggaacttggcgtcacgcggcagaccctgtatcggcatgtttcacccaagggtgagctacgtccagatggcgagaagctactcagccgaatttgatgccggcatgaggcaacgtagcgacagcgtggtttgtctcaatgggaagcgctcatgatcgatctttgaaggcccgcagcagtcgtgtcacagacaggacgaacaaaccggtcagcgtgagggctgcgataccccagtactctccgatgaacgcgccggccgtcgtgccggccagcacaatggcgagaatcggcaaatggcagggacaggtgagcacggccagcgcgccccacaggtagccggtgatcggtttgtgcgtctcggacggcaagcgctcggggctgttcatggcagactctccgcgtgctgtgccggctcggtcggcatggtggccaactgcacctccagatcggccaacgcttcgcgccgacgctcgacgaactggcgcagaacggcaagctgcgcggccgcttcatcgccgtccgcagcatccagcgcccggcacagccgcgccagcgcgtccaggccgatgcccgcctcgaaggccgcccgcacgaagcacagccgttgcaaggcggcatcatcgaacaggccatagccgcccggggtgcacgccaccggacgcagcaatccgcgcagcaggtagtcgcgcacgatatgcacgctcaccccggcatcaagggccagccgggacacggtgtaggcgctcattgaaaacctcctttttttatccagcgcagcaggaaagctgcttcacgtccttgttgaaggtctgcgccgcaagcttcaacccctcgaccattgtcaggtaggggaacaactggtcggccagttcctgcaccgtcatgcggttgcggatggcgagcaccgccgtctggatcagttcgcccgcttccggggccaccgcctgcacgccgatgagccgtccgctaccttcctcgatgaccagcttgatgaagccgcgtgtgtcgaagttggcaagcgctcgcggaacgttgtcgagtgtcagcgtgcgactgtcggtctcgatgccatcgtggtgcgcttccgcctcgctgtagcccacggtggcgacttgcgggtcggtgaacaccactgccggcatcgcggtcagattgagggctgcgtcgccgccggtcatgttgatcgcggcacgggtgccggcggccgctgccacgtagacgaactgcggctggtcggtgcagtcgccggccgcgtagatgttcgggttgctcgtgcgcatgccttggtcgataacgatggccccttgcgcattgacagtgacccccgccgcgtccagcgcgaggctgcgcgtattcggtgcccgaccggtggcaaccagcaacttgtcagcgcgcaattcaccgtgtccggtggtcagcacgaattcgccgttcacatgggcgacctggctggcttgcgtgtgctccagcacctcgatgccctcggcgcggaaagcggctgtcacggcctcgccgatggccgggtcttcccggaagaacaaggtgctgcgtgccaggatcgtgacctggctgccgagccgggcaaaggcttgcgccagttccaacgccaccaccgacgaaccgatcacggccaggcgtgcgggaatggtgtcgctgacaagcgcttcggtggaagtccagtagggtgactctttcaggcccggaatcggcggcacggccggactggcaccggtggcgaccaggcagcggtcgaacgttacctcgcgctcgccaccctcgttcaaacggacgaccaggctctggtcgtccttgaaacgcgcttcaccgtgcaaaacggtgatggctggattgccgtccaggatgccttcgtatttggcgtgccgcagttcatcgacacgggcctgctgctgggccagcagtttgctgcggtcaatcgcaggcacagttgccgcaataccgccgtcgaacggactttcccggcgcagatgggcaatatgggcagcgcggatcatgatcttggacggcacacagccgatattgacgcaggtgccgccgatggtgccgcgttcgatcagcgtgaccgtcgcgccttgctcgacggccttcagcgccgccgccatcgcggccccgccgctgccaatgatggcgatatgcaaaccggcgccctcaagtgcatcacggatttttggttcatctttgaaatcaccaacccggatcgagccttgataacccaatgcggcgatggcggccagcagttggttgtggctcacggcggtgtctgccatgacttgcgcgcggctttctggataggacaccacagcggcattcacgccgggaatcttttccaaagcatctttgacatgggtggcgcaggatgtgcaggtcatgccattcacggtgatttcggtcatttttttactccattgaatttcggggtgcagcaggcatcggcttggcgttttcgttggatggcgtagatggtcaagccgatgaaaatcgccagcgcaggcagcagcacatagtccagatagccggtcagcgcggacaagccgaccacaccgagcaaaatgaccagaacaggggtgaagcaacacagcgccacgagggttgtgccaatgatgctgacccgcagcagtgtcttcgggtctttcatgatcagttcttgactgatgatgggtagcccgcatcctcggtagccttggtcagtttctgcacgctggtcttggcatcatcgaaggtgaccaccgcttcgcgcgtctcgaaggtcacgtcaactttactgacgccatcgaccttggaaatcgccttcttgacagtgatcggacaggccgagcaggtcatgcccggtacggacagcgtaacggtctgggtggcggcccacacgggggcaacaacggcagcgagggcaagggcggaaagcagctttttcatggtgaactcctgtgatcaatagaaaaatggcacgacgtagggaaatccgagcgcgaccaaaaccagcacggccacgccccagaaaatgagcttgtaagtagctcgcacttggggaatcgcgcaaacctcacccggtttgcaggcggctgacggccggtagatgcgccgccaggcgaagaacaacgccaccagcgccacgccgataaagatggggcgatagggttccaacaccgtcaagttgccgatccaagcgccgctgaaccccaaggcgatcagaaccagcggcccgaggcagcaagccgaggcgaggatggcggccagcccgccagtgaagagcgcgccgcacccgttttgaggttcagacatacgtttgtcctttcgaatctgaattggatagcttaagcttacttccgtagttatgtacggagtcaagcgatatggaaaacaatttggagaacctgaccattggcgttttcgccaggacggccggggtcaatgtggagaccatccggttctatcagcgcaagggcttgctcccggaaccggacaagccttacggcagcattcgccgctatggcgagacggatgtaacgcgggtgcgcttcgtgaaatcagcccagcggttgggcttcagcctggatgagatcgccgagctgctgcggctggaggatggcacccattgcgaggaagccagcagcctggccgagcacaagctcaaggacgtgcgcgagaggatggctgacctggcgcgcatggaggccgtgctgtctgatttggtgtgcgcctgccatgcgcggaaggggaacgtttcctgcccgctgattgcgtcactgcaagggaagaaagaaccgcgcagtgcggacgcggtgtagcccgagggaactacgccttagcgtgctttattttccgttttctgaggcgactccaacgtcagaaaagaccgtgcggtcgacttttgatatttcgtgctgtcgccttctgaaagtgacatcgggatcctcggccgacaaggtgcaacagccgacgatgccgtcgctgcaactcgcgactaggagctcggatctcaggacgaaggtctccgcgaatgtccggtcgatccgcgcgacgtcccaggcgggcgttcccttggcggacatccacgccgcagcgtcgtgcatcagccgcacaacctcgtcgatatcacccgagcaggcgacccgaacgttcggaggctcctcgctgtccattcgctcccctggcgcggtatgaaccgccgcctcatagtgcagtttgatcctgacgagcccagcatgtctgcgcccaccttcgcggaacctgaccagggtccgctagcgggcggccggaaggtgaatgctaggcatgatctaaccctcggtctctggcgtcgcgactgcgaaatttcgcgagggtttccgagaaggtgattgcgcttcgcagatctccaggcgcgtgggtgcggacgtagtcagcgccattgccgatcgcgtgaagttccgccgcaaggctcgctggacccagatcctttacaggaaggccaacggtggcgcccaagaaggatttccgcgacaccgagaccaatagcggaagccccaacgccgacttcagcttttgaaggttcgacagcacgtgcagcgatgtttccggtgcggggctcaagaaaaatcccatccccggatcgaggatgagccggtcggcagcgaccccgctccgtcgcaaggcggaaacccgcgcctcgaagaaccgcacaatctcgtcgagcgcgtcttcgggtcgaaggtgaccggtgcgggtggcgatgccatcccgctgcgctgagtgcataaccaccagcctgcagtccgcctcagcaatatcgggatagagcgcagggtcaggaaatccttggatatcgttcaggtagcccacgccgcgcttgagcgcatagcgctgggtttccggttggaagctgtcgattgaaacacggtgcatctgatcggacagggcgtctaagagcggcgcaatacgtctgatctcatcggccggcgatacaggcctcgcgtccggatggctggcggccggtccgacatccacgacgtctgatccgactcgcagcatttcgatcgccgcggtgacagcgccggcggggtctagccgccggctctcatcgaagaaggagtcctcggtgagattcagaatgccgaacaccgtcaccatggcgtcggcctccgcagcgacttccacgatggggatcgggcgagcaaaaaggcagcaattatgagccccatacctacaaagccccacgcatcaagcttttgcccatgaagcaaccaggcaatggctgtaattatgacgacgccgagtcccgaccagactgcataagcaacaccgacagggatggatttcagaaccagagaaagaaaataaaatgcgatgccataaccgattatgacaacggcggaaggggcaagcttagtaaagccctcgctagattttaatgcggatgttgcgattacttcgccaactattgcgataacaagaaaaagccagcctttcatgatatatctcccaatttgtgtagggcttattatgcacgcttaaaaataataaaagcagacttgacctgatagtttggctgtgagcaattatgtgcttagtgcatctaacgcttgagttaagccgcgccgcgaagcggcgtcggcttgaacgaattgttagacattatttgccgactaccttggtgatctcgcctttcacgtagtgaacaaattcttccaactgatctgcgcgggaggccaagcgatcttcttcttgtccaagataagcctgtctagcttcaagtatgacgggctgatactgggccggcaggcgctccattgcccagtcggcagcgacatccttcggcgcgattttgccggttactgcgctgtaccaaatgcgggacaacgtaagcactacatttcgctcatcgccagcccagtcgggcggcgagttccatagcgttaaggtttcatttagcgcctcaaatagatcctgttcaggaaccggatcaaagagttcctccgccgctggacctaccaaggcaacgctatgttctcttgcttttgtcagcaagatagccagatcaatgtcgatcgtggctggctcgaagatacctgcaagaatgtcattgcgctgccattctccaaattgcagttcgcgcttagctggataacgccacggaatgatgtcgtcgtgcacaacaatggtgacttctacagcgcggagaatctcgctctctccaggggaagccgaagtttccaaaaggtcgttgatcaaagctcgccgcgttgtttcatcaagccttacggtcaccgtaaccagcaaatcaatatcactgtgtggcttcaggccgccatccactgcggagccgtacaaatgtacggccagcaacgtcggttcgagatggcgctcgatgacgccaactacctctgatagttgagtcgatacttcggcgatcaccgcttccctcatgatgtttaactttgttttagggcgactgccctgctgcgtaacatcgttgctgctccataacatcaaacatcgacccacggcgtaacgcgcttgctgcttggatgcccgaggcatagactgtacaaaaaaacagtcataacaagccatgaaaaccgccactgcgccgttaccaccgctgcgttcggtcaaggttctggaccagttgcgtgagcgcatacgctacttgcattacagtttacgaaccgaacaggcttatgtccactgggttcgtgccttcatccgtttccacggtgtgcgtcacccggcaaccttgggcagcagcgaagtcgaggcatttctgtcctggctggcgaacgagcgcaaggtttcggtctccacgcatcgtcaggcattggcggccttgctgttcttctacggcaaggtgctgtgcacggatctgccctggcttcaggagatcggaagacctcggccgtcgcggcgcttgccggtggtgctgaccccggatgaagtggttcgcatcctcggttttctggaaggcgagcatcgtttgttcgcccagcttctgtatggaacgggcatgcggatcagtgagggtttgcaactgcgggtcaaggatctggatttcgatcacggcacgatcatcgtgcgggagggcaagggctccaaggatcgggccttgatgttacccgagagcttggcacccagcctgcgcgagcagctgtcgcgtgcacgggcatggtggctgaaggaccaggccgagggccgcagcggcgttgcgcttcccgacgcccttgagcggaagtatccgcgcgccgggcattcctggccgtggttctgggtttttgcgcagcacacgcattcgaccgatccacggagcggtgtcgtgcgtcgccatcacatgtatgaccagacctttcagcgcgccttcaaacgtgccgtagaacaagcaggcatcacgaagcccgccacaccgcacaccctccgccactcgttcgcgacggccttgctccgcagcggttacgacattcgaaccgtgcaggatctgctcggccattccgacgtctctacgacgatgatttacacgcatgtgctgaaagttggcggtgccggagtgcgctcaccgcttgatgcgctgccgcccctcactagtgagaggtagggcagcgcaagtcaatcctggcggattcactacccctgcgcgaaggccatcggtgccgcatcgaacggccggttgcggaaagtcctccctgcgtccgctgatggccggcagcagcccgtcgttgcctgatggatccaacccctccgctgctatagtgcagtcggcttctgacgttcagtgcagccgtcttctgaaaacgacagcgcggcacgggaatcaaggcattgcgattctcgaaaatagttcttgaaattctattcttgattgcatatcatctcaacgagtttcgataagaaaggatgcgcatgcgaccgtctgttgtgcttgacatgaagcgaagcgcagtgcgtgaagcggtaggccgctttcgcgccgcgaacccgcgcgtcttcggctcggtgctgcatggcaccgaccgggatggcagcgacctcgacctgttggtcgatgcgctgcccggtgccacgttgttggacttgggcgatttggaagaagaactgaaatcgctgctcggcgttgacgtcgatctgctgactcccggcgacctgccgccgaagttccgggccaaggtgctcgcggaggcgcaaccgatatgagcgagaaccgcctgcccgattacctcgaccacattcagcaggccgcaaccgatgcgcgcagcttcgtggaagggatggccaaggacgacttcttggccgacaagcgcacccagcaggccgtcatcatgagcctgatcgtcatcggcgaggcggccacaaaggtgatggatggctacgtcgagttcacccaggcgcatgccgacgtgccgtggcgcagcatgcgcaatatgcgtaatcgcatggctcacggctatttcgacatcaacctcgatgtggtgtgggagacggtacaggaatggctgccggcgttgctccagcaattgcccgccgtgcgtcaggatgccgacgatgaagaccgtaacgacaactgtgaaagagggatctccgatgactgttgaatcgagaatattttctgtagccgagtatgttcagccgtccgaaggcgagcctattcgttccgttgtgcttgaaacccgagactcaattatcgtggtttggcatgtccatcccgggcaggaaattgcggctcacattcatcctcacggccaagacacgtggactgttttgtcgggaatggctgattactttcagggcaatgggattgttcgtgccctcagggaaggtgagatagccgtggcaagaccgggccaagtgcacggggcgcgaaatacaggtaccgagccatttgtgttcgtctcggttgtggcatcagccaatgccggtttcgtattggctgagcgatagagcccaatctctggagttggtccaatgagcggtcggggagataggtaacagacatgcagcggacacggctgctaaaccaggtcgcaaacctccttgcgtcgcagcgtgccgcaagcgacgcgatcaatcgaatggggtcggcatgagactgaacaccatccagttcccgaccgcgtagccgcctgtcctgccgatcaggtcttgaccatcgacgcctgggatcagtcctgaatgttcttggagaccactacgttatgagccgcagccgccgcaaaacacccatcgtcgggcacacgacctgcggcagcgagcgcgaggacaagaagctctggcatcagcgctggcgcacccgtgagcgcacggcgctgaccagcgcgtcgcccgaagccctgagcgcccatctgcccctgctggaaaaccaggccagcagcgtctggtcgatgggcaaggatggccgctcctactggcccgtcaagcgccaggccgccacggcggatcgcatcgccaatcacaagggacgcaacccgcaagaacgcgcctccctgaaaaagcgcctgctgcgcaagtggatgagcaaatgaagctctccttccatcagcacattgcgctgttctggatgatcggtgctccgggcgtcttcgcgcccgtgatcgagaacgccaagcggcccgatgccggcgccgtcatggcgtggggtgtcgcgatcgtggcggtgatgatcctcttcacccctttgctgctgcgctgtccaccattccggcgctggtatggccggacggatgcgctgtcggagcggcagcgccaggcgcttgccgagcgcggcctgcgccgctactaccagaccgctttcgatgacggctacgtgccccgcgtgatgccctacgtgtggcgcatcatctggacggtcggcgggttgatggctgtgaccgccgtactgcctaccaacaccggacggccagccttcgatgccttggtggtcttctcgacctggtatccgataggcgtgatgctgctggttttcgcgtcgaggccccttggccggttgattcgccaaagagcacaggagcggcggaaatgagcacgtcaaccatcgaggcgctggccagcgcctgggcaaggattgccgaggaagcggaattccccgctgactacgaggggactgccacaccacaagcgcatcgggctagcgaagctattcaggagcagattcgggagcgcatcgtcgccaccaacgacatgcggctgttcagcctgctgcacctgctgggtcaggcgtcgctgcgcatggagcaagcgctgtggccggaggattacgagcggatgacgcgcgaggttgaggaagccctgcggcaagccaccgacgccaacgccagatcgtacacccacgaagaagtgatgcaggcgatgcaggaacgcatcgaccgggcgcgagacaagccatgttgattggctatgcgcgcgtctcgacgcaggatcagaacctggagctgcaacgcgaagccttgagcaaggccggatgtaaaaaggtcttcgaggacaaggtgagtggcacgcgggcagaccggcctggcttggccaagacgctcgaaatgctgcgcgaaggcgatactttggtcgtctggaagctcgaccggctgggccggtcggtcaagcaactggtcgatctggtcggcgatctgcacaagcacggtgtccagttcaggagcctcaccgactccatcgacaccggcacaccatccgggcggttcttcttccacgtcatggcgagccttgccgaaatggagcgcgagctgaccgtcgagcgcacccgcgccgggctggaagtcgccaagcagctcggccgcaaaggcggccgcaagccgaagatgaccgacagcaagatcgagtcggccaagaagctgctggccagcggggtgccgcccaaggacgtggccaagaacctcggcgtgtccattccgacgctgtaccgctgggtgccagcctccacgcacgcttagcgtgctttattttccgttttctgagacgacccccgtcacagggaaaaaccctggccgtcatgcaggtcagcggcggctcacagtcgttcaacgctgtaaatcagatgcgtattcttggacgctggatgcggatgatcaccatcccgaatcagtcatccgtggcaaaagcctgggccgagtttgatgaggatggccgcatgaagccttcttcgtattatgaccgcatagtggacgtcatggaggaactgatgaagttcaccctgctgacgcgcggtcgcagtgattatctcaccgaccgctacagcgaaaggaaagagagtgccgcgcagctttctgagcgggtcaaccagcgcagcatataaaaaagccggcagatgccggctttttccacactgttatgcccgcagcctggtaaaaaatcagtggctgacgcggttcccgtgctcatcaatgacggcttcgccgtcctctttggtaaacgcgccctgctgcgggtccggcagtatgtccagaaccacttcggagggacggcacagcttcgtgccgagcggtgtcactaccaccgggcgattaatgaggatcggatgagccagcatggcatcgagcagttcgtcattgctgaagcggtcttctgccaggccgagctgttcgtacggttcggtatttttgcgcagcaggtcgcgcacgccgatgcccatatccgcaatcagcttcttcagctcatcgcgtgacggcggcgtttccagatacagaataaccgtgggttcggcgccgctgttacggataagcgccagggtattgcgggatgtcccgcaggccgggttgtggtaaatggtaatgtcagtcataagcggtactccgtaaaggggctgcacgggcgcagccccggggttaaagttaaacagacaggcgcagggccagcgcggccagcgtgacaaaaagcaccggcagggtcatcacgatgcccacgcggaagtaatagccccagctgatggtgatgtttttctgtgccagcacgtgcagccacagcagggttgcgaggctgccgataggggttattttcgggccgaggtcacagccgatgacgttggcgtaaatcatcgcctgcttcaccacgccctgtgcgctactaccgtcaatcgacaacgcgccaaccagcacggtgggcatgttgttcatgacggacgagagtgccgccgtcaggaagccggtgccgagcgttgcgccccatacgccgtgctctgcaaaccggttcagggcggcggaaaggtaatcagtcagtccggcgttacgcagtccgtataccaccagatacatgcccagcgaaaagataacgatctgccagggcgcgcctttcagcaccctgccggcgtcaatcacgtgtcctttgcgggcaaccagccagagaataaacgccgccaccgccgccaccaggctgaccggcacgccgagcggctccagagcaaaaaagccaaccagcagaagaaccaaaaccacccagccagccttaaaggttcgtgcatcccggatggcttcccgcggtgccttcagcttcgccaggtcataggtgaccgggatgtccctgcggaaaaagagatgaagcatcaccagcgtggccgcaatggaggcaatgttcaccggcaccatgacggatgcgtactcgctgaagcccagcgtaaagaagtcagccgttacgatgttcaccaggttcgatacgatgagcggcaggctggaggtgtcagcgataaagcccgctgccatcacaaacgccagcgtggagccgggagtgaatcccagcgccagcagcatggcaataacgatcggcgtcagaattagcgcggctccgtcattggcaaacagcgccgccactgcggcacccagcagaacgatatacgtgaacagcagccggcccctgccgcctccccagcgggaaacgtgcagcgcggcccactcaaaaaagccggactcatcgagcagcaggctgataatgatgaccgcaatgaacgtgcccgtggcgttccagacaatctgccagaccaccggaatatcaccgatgtgcaccacgccggtcagcagcgccagcgccgcaccgatgacggcactccagccaatgctcagccccttcggctgccagatgaccagtaccagcgtcaggatgaaaatcgcacctgccagaaacatacccgctcctattgaatacaaatgcctgttaaaccggactgataaattttcgatgcgtaatatattcgataatccagatatataccggtaaatttttaaatgcagacaggcttgccgttggtggtggcgttatcgcgttcagcctgccggctgagctggcggatatcatcccgctggcagagataagcctgttcgataaccgccgctgcccacgccggcatatgaggcgacagacgatagtggatccattttccgtcccgccggtcggtaagcagcccgttttctctcagcagagccagatgccgtgagattttgggctgagtttctttcagcacggacgtaagttcacagacgcagagctcccctttttcgcgtagcagcagcacgaggctgagtcgggtttcgtcggaaaggcttttaaaaagctgcagggggacacgggtggcatggtgactccttattgtgactgacctgagtgtacctgtgaaactttctccgtcaaatttatattcacttaatcatatgtatgtgcgaacgccggacgagcctgagcatgcagaaggactttccgtccggatgcgcctgaccggcattccatgaacagcgtttttgccctgcgcgttgaccccgttaacaattcgtgtagagtaaaaagcgctttttgccgtggttcatctgcccggcgggcatttgtggccggtactgaacgtctgttcatccggtctttctgattacccgcgctgctctgtcagccgtgaaggagtgataaacaccaccatgcgtcttacgccaccctgagtcgtacccctcctctgtcgcactgaataaacttcggcgcgcactcaaaaacatcccgtctgcggatgtgctttttcgtacgtaaaatttttgccctcacgggctgaccgtaatcaaaaactgagaaatgactatgctgctgtcctcgacgcgtaaggactggctgggtaacgtccgtggtgacgtccttgccggtattgtggtcgcgctcgcgcttattcccgaagcgatcgccttttccatcatcgccggagtcgacccgcaggtcgggctctactctgcgttctgtattcccctggttatggccttcctcggcggccgtccggcaatgatatcgtccgccaccggtgcgatggcgctgctgctgatcacgcttgtaaaagaccacggcctgcagtatctgctggcggcctcggcgctgaccggcgtactgcagctggcggccggctacctgaagctgggcagcctgatgcgctacgtctcccgctcggtggtcaccggtttcgtgaacgcgctggccatcctgatatttatggcgcagctgccggagctgaccaacgtcacctggcacgtttatgccctgaccgctgcgggcctgggcatcatttatctcttcccgtatctgaacaaaaccattccctcgccgctggtctgcatcatcgtgctgaccgccatttccatgtggctgcacctggacgtgcgcaccgtgggtgacatgggcaaactgccggacagcctgccggtgtttctgatcccggatatcccgcttaacctcgacacgctgatgattattctgccgtactcggcaggacttgccgtggtggggctgctggagtcgatgatgaccgccaccatcgtggacgacatgaccgacacgccgagcgataaaaaccgcgagtgcaaggcgcagggcgtggccaacatctgcacctcctttatcggcggcatggcgggctgcgcgatgattggccagtcggtgatcaacgtcaaatcgggcgggcgcgggcggctttccacgctcaccgccggcgtggtgctgctgctgatggtggtgttcctgcgcgactgggtgtcccggatacccatggcggctctggtggcggtgatgatcatggtctccatcggcaccttctcctggcgctccatcagcaacctgcgcagccatccgctgtcaaccagcgtggtgatgctggccaccgtggtggtggtggtggcgaccgataacctggcgtttggcgtgctcaccggcgtgctgattgcctcgctgaacttcgccaccaaggtcgcccgctttatggcggtctcctctgagctgaaggacgacacccgcacctataccgtagccggccaggtattctttgcctcatccgatcgctttatgagccacttcgacttccgtgaagcggtggagcgcgtggtgattgacgtaacgcacgcccacttctgggatatcacctccgtgagcgcgctggaccgggtggttatcaagttccgtcgcgaaggcacggaagtggagatcaagggtatgaatgacgcgacccgcaccctcgttgaccgcttcggagtgcatgacaagcctgaagaagtggaaaagctgatgggtggccattaatttactggagaaagcatcatgaataacaccgttattgcctgcgttgacggctcgccgtcaacccggccggtctgtgagtatgctgcctgggcagccggtaaacttggcgcgccgctggcgctgctgcacgtgctcgaaaagagtgagactcccgccgtgtctgacctgaccgggagcattggtattgacagccgggagcagctgaccgaagcgctggtccgcgtcgagggtgagcgcagccggctgctgatggcgcagggcaaggccgtgctggccggctgtgcggagctcctgaagcagaccggacagccggacgcacagctgctgcaaaagcacggcgcactggacgaaatcctggcggagctgggcgaagtccggctgatggtgctggggcgccgcgggacgcagaatcaggtaggcagccatctggaaagcgtcattcgcctgcagaaaaacccggtgctgattgtgccggagacgtttacgccgccggcgcgggtgatgtttgcgtacgacggcagcagtgagagccgtaaaaacctgacgcgcctgacggtcagcccgctgctgcacggcctgagctgtcatatcgtgatggtcaacggtgacatgtcagccctgcaggatgcgcaggctgttcttcaggaagccggtatcacgaccgagacacgcctgctggaagacgagtccgtaaccggggcgctgtgccgctacgcggacgcccatgatatcgacctcacggtaatgggggcctgcgggcactcccggttacggcgattctttattggcagccacaccacggaaatgctgtctgaaagccgtcagcccctgctgatgctgcgatgaaacaggcgggcctgatatcaggcccgccttcacaggggaaagaggatgacgggtatgaaggtaaaggcgcgttattgcggcgcatccgtcctgataccggtggccagcaggctggcgccaagaatgtagaccaggcagaacagggcctgaagatgcagggtgacatggttatctatcagcacgcccatgattaccggggatgccccgctggcaatcaccgtccctgcctcaaccgccgagcgcaccctggccagctgcgccggaccaaacagctgtacccagagcgcggtggcaagcgttgaggcaatggccgacgatacgccggtcataatcaggtaaaaaggcgtcacccactgaccgttgctgagccatagcgccagcatggccagggcctgtggcatcagaaaccacggcagcagcctgcgtggtgagagccggtcaatcagcgggccaaacgacagcagcgataccgcctgggtaatggcataggcaataaaccataccgccacccacgacagctcccagcctttctcctgtgccagcctcgcctggtggaagaagaagccggtggtgataaagggggaggccagcacgacaggcagcgccagcagcaggttgcggtttcgccataccggcgcctctttttctttctcctcaccccgctttctgaacgtacgcagcggcttctctttcccgcggggcaaaaacatcagcgcgacccccacgccggcaacaagcattccggcattgatgccccaggcagcgcgccatcccgtcagcgcgcttatctgcaccgcaatcacaggaaaaacggcctgcgccagcgagagccccagcgcgatggcgccgagcgccttgcctgcatcaagggggaactggcgcgccgttgcggtcagcgcagtatgcaccatcagtccctggccgccgaggcgcagaaagtaaaacccgatgcacagcatccacgccgcctgtgcgccggaaaccagcaggcaggccgtgagcagcaaaagggtgaccgccagcgtgaagcggcgggtcgtggtgtagtcaatcagccgtccggcccaggtcagcgtgatggcgctcatcaccgttccgattgcgtacaggccgcccagtccgccgtcggtgagcccaaaggcctcacgaaaatcctgcccgtaaagtgagacaaaataggtctgtccaaagctggacatggccatcagcatcgcaccgaacgtaaggtgagaggcgtgatgaaacataaaccgaaaaagctgacgcatgaatatccctgaaggcgggctgcagcccgccgattaatcacgacgtgtccgtaccggctgctgcggacacggcgcctgcgtccctgaagcaggtacacgcgggttcaccgtgaaaggtggcagtcccgtaacggatatgagagaacggtacccggcgcggactggctgtcgcggcaggctctctgataaaggacgggcgaagagaaactcagggtggcgtaatgtgcatgactcacagtcagatataaaatgctgccgaaacgataatttttaatgctcttcaggtcaagcctgaaaacgggctcctcatgcccgccgcagggggagtcgcacaaaaacagtggatagccgcttgattaacgcccgtgaccgggccagaattgcggcgaggtgatggcgttccaccttacccaaccgcttcccctgagaagctgatgacgcctgatattactcccctttaaccgggagtaggctttgttgaataaatcagatttcgggtaagtctcccccgtagcgggttgtgttttcaggcaatacgcacgctttcaggcatacctgctttcgtcattttgttcagcgctcgtaccagggccatagcctccgcaacctgaccatcgtagtcacgcagcgtcagtgaacccccgaacagctgttttacccggtacatcgccgtttccgctatcgagcgacggttgtaatctgttgtccatttccaccgcgcattactcccggtcattcgctgattagccactgcacggttacggtctgcatattcaccgggccagtaacccgcaccttttcggggagggataagcgcgctgattttcttacgccgcagttcatcgtgacagagccgggtgtcgtaagcgccgtctgccgatgctgccctgatttttctgtgagtctgccggataagacccgggaaggcttctgagtccgtcacattgttcagcgacaggtcagcgcagatgatttcatgtgttttactgtcaacggcgagatgcagcttacgccagatacggcggcgttcctggccatgctttttgactttccactcgccttcaccgaagaccttcagcccggtggaatcaattaccaggtgtgcgatttcaccccgggtgggcgttttgaaactgacattaaccgactttgcccgcctgctgacacagctgtaatccgggcagcgtagcggaacgttcatcagagaaaaaatggaatcaataaagccctgcgcagcgcgcagggtcagcctgaatacgcgtttaatgaccagcacagtcgtgatggcaaggtcagaatagcgctgaggtctgcctcgtgaagaaggtgttgctgactcataccaggcctgaatagcttcatcatccagccagaaagttatggagccacggttgatgagggctttattgtaggtgggccagttggtgattttgaacttttgctttgccacggaacggtctgcgttgtcgggaagatacgtgatctgatccttcaactcagcaaaagttcgatttattcaacaaagcctttttttatatacgatctgacgaattcagcagaaggaaactcatcattcgtgacgaaataaaaattagtttccccattaatatagaaatgagtgtttactcacagaaagaaaatcaggagtaattattctgaagacagataatacagaagtcgtacagcgcatttaactcacttctcaggaggttaatcactctctatttgtggacaaccgacatgtcttaaggctctggaataacgtgttgatatttcgatgcgtagcatgcagcggaatattaccggatcaataaagcaggaagaggcgttttaattctttccgcaggatgatagtagggtgactgccatgtctgattataatgaaaaaagtgcgatctccgcacttctcgcaggtcattgttccgatccattttccgtgcttggcatgcactcaaccgatgcgggtctggaagtgcgcgcattattacccgatgccaccgatgtatgggtgattgaaccgaaaaccgggcgcaaagtcggtaaactcgaatgcctcgacacacgcgggttctttagcggcgttctgccgcgccggaaaaatccttttcgttaccagctggccgtcacctggcacggtcagcaaaacctgattgacgacccctatcgctttggcccgctgctgcaggagcttgatgcctggctgctcgctgaagggactcatctgcggccctacgagacgctgggagcccatgccgacaccatggacggcgtcaccgggacgcgtttttccgtctgggcgccgaacgcccgtcgtgtgtcggtggtcggacagttcaactactgggacggccgccgccacccgatgcgtctgcgcaaagagtccggcatctgggagctgtttgtccccggcgcgcataacggccagctgtataagttcgagctgattgacgcccacggccacctgcgggtgaaatccgacccgtatgcctttgaggcacagatgcgcccggaaagcgcgtcgcttatctgcggcatgccggaaaaggtcgaacagccacagtcccgtcagcaggccaaccagtttgatgcaccgatttcgatttatgaagtgcaccttggctcgtggcgccgccacgccgataaccatttctggctcagctaccgcgagctggcggaccagctggtgccttacgcgaagtggatgggcttcacccatctggagctgctgccggtaaacgaacatccgttcgacggcagctggggctatcagcccaccgggctgtacgcgccgacccgccgttttggtacccgtgaagacttccgctacttcctgaatgctgcccatgccgcgggtctgaacgtgatcctcgactgggtgccgggccacttcccgtcggatgactttgcgctggcatcgttcgacggcaccgcgttgtatgaacacagcgacccgcgagaaggttatcaccaggactggaatacgctgatctacaactacggtcgccgtgaagtcagcaactttctggtcgggaacgcgctgtactggattgaacgcttcgggatcgacgccctgcgcgtggatgcggttgcgtcaatgatctaccgcgactacagccgcaaagagggggagtgggtgcccaatgagtacggcggccgggaaaacctcgaagcgattgaatttctgcgcaataccaaccgtgtgctcggtgagcagacgccgggagcggtcacgatggcggaggagtccaccgacttcgccggggttacacgaccgtcttcgacgggcggtcttggcttctggttcaaatggaacctcggctggatgcatgacaccctcgactatatgcagctcgatcccatctatcgtcgttatcatcacgacaagatgaccttcgggatgctctacaactacaccgaaaacttcgtgttgccgctgtcacacgatgaagtggttcacggcaaaaaatcgattcttgaccggatgcctggcgatgcctggcagaagttcgccaacctgcgcgcctactacggctggctgtttgccttccccggtaaaaagctgctgtttatgggcaacgagtttgcccaggggcgggagtggaaccacgacgccagcctcgactggcatctgctggaaggggcgacaactggcatcacggggtgcagcgtctggtgcgcgatctgaaccatacctatcgccaccataaggcactgcacgaactggattttgacccctacggctttgaatggcttgttgtggatgaccatgaacggtcggtgtttatctttgtccgtcgcgataaagccgggaacgagataatcgtggcgagcaacttcacgccagtaccgcgtcacggctatcgcttcgggattaaccagccggggcgctggcgtgaagagctgaacaccgactcgatgcactaccacgggagcaacaccggcaacggcggctgcgtggcaagcgaggcgatcgccagccacggtcgggagcattcgctgtcggtgactctgccgccgctggcgacaatctggctggtacgggaatctgcagggcaataaaacgcgcagctgatttattgcagctgacttattaccggaggtgatcacttctgaattattttgcagaagagtgaggctttttcttcattattttcttttatggcttttatttaatagcaggacattattatgagtaaacttgaatatactgacaacttaatgctgtcgcgccagttaccgcttaaatccgtggcccngatcctcgccggcggacgtggcacacgattaaaagacctgaccactattcgcgcaaaacctgcggtgcatttcggcggtaaattcagaattattgattttgctttatcgaattgtattaactccggaataagacgtatcggggtcattacacaatatcagtcccattcactggtgcagcatattcaacgcggctgggcattctttaacgaagaaatgaatgagttcgtggatttattaccggcgcagcagcgggtgcatggtgagaactggtatcgggggacggcggatgccgtgacccagaatctggatattatccgccgctatgatgcggaatatgtcgttattctggccggggaccatatctataaacaagattattcgcggatgctgctcgatcacgttgaaaaaggggcgcgctgtaccgtggcctgcctgccggtcccggttgaagaggcaagcgcttttggcgtcatggccgtggatgagaatgacaaaatcattgaatttgttgaaaaaccggctaatccgcccaccattcctggcgatgaaacccgctcgcttgccagtatgggcatttatgtgtttgatgcggaatatctctaccagctgctggaagacgacgatcgggatgaacactccacccatgattttggcaaagatattattcccaggataacggcggcaggtgaagcgtatgcgcatccgttcccgcgctcctgcgttcagtcggataataatgccgagccatactggcgcgatgtcggaaccctggaggcgtactggaaagcgaatctggatttagcctcagtagtgccagagctggacgtttatgaccgtaactggcctatccgtacctatgtcgaatcgctgcccagcgccaaatttgttcaggaccgttccggcagtcatggcatgaccatgaattctctggtctccggcggctgtattatttctggctcggtggtggtgcagtcggttctattttccagagttcggattaactcgttctgtaatattgattcgtcggttttattaccgggcgtctgggtcggtcgctcctgcaggataagacgctgcgtgatcgaccggggatgcgttattccggaggggacggtgattggcgaaaatgccgttgaggatgcgcgacgcttttatcgttcggaagaaggcatcgttctggttaccaaagaaatgctggacaaacttgaggtatgagcccatttgcggaaaaagcgtgtccggcggcagagaaaatattgccctgtcgcgggtcgtctctgtggctgaataataaggagcatacatgcaagttttacatgtaggagcagagatgttcccgctgttaaaaacgggcggactggccgacgtcaccggcgcgctcccggcggcgcaaattgccgaggggctggatacccgcgtgctgctgcctgggtttccggcgatccgcaacggggttcaggatccgcaggtggtggccagcagggagacattcgccgggcggatgacgctgctgtttggccattttaacggtgtgggcatctatctgattgatgccccgcatctctatgaccggacgggtaatccttatcataaccagcagatgcaggattatcctgataacgtcctgcgtttcgcgttgctgagctgggtcggggccgagcttgccggtggtcttgacccgttctggcgtcctgaaatcgtccacgcccatgactggcacgcgggtctcaccccggcttatctggccacccgcggcaacccggccaaatcggtgtttacggtgcacaacattgcctatcaggggttgtttcaggcccggcatatggcggagatcgcgttaccgtggtcgttcttccagatgcacggggtggagtttaatgggcaaatctccttccttaaggcgggtctctatttcgctgaccatatcaccaccgtcagcccgacatatgcccgtgaaattaccgaaccacagtacgcgtttggtctggaagagctgctgcggcaacgtcagcgggaagggcgactgtcggggatcctgaacggggttgacaaaaatatctgggatccgcgccgcgatccgctgctggcagcgccttacgaccagaattcactggcggagaaagcgaagaacaagcagcagctgcagacgtcgctggggctgaaggcggacgatcgggcgctgctgttcaccgttgtgagccggctgaccagccagaaggggctggatcttctgtttggcgcgctgccgggaattatatctaagggagggcagctggcgctgctgggatccggggacccggatttgcaggcccgttttctgaccgccgaggcgcaataccccgggcaggtgagtatccggatcggctacgacgaggcgctgtcgcatcagatgattggcggcgccgacgtcatcctggtgcccagccgttttgaaccctgcggtctgacccagctttatggtctgcgctacggcacattaccgctggttcgccgtaccggcggactggcggataccgtcgccgactgttcgctcgaaaaccttgttgacgggctcgcgaccggatttgtgtttaccgacagcgagacggaatcgttattacatgctatccaccgggccagtgtcctgtggtcgcgtccctcgctgtggcgttacgtgcagcggcaggcgatgagcatggattttagctggcaaagtgccgcaaagtctttccacctgttgtatcagcgtattatttaattgctacggataagaaaaatggaaccacgcataagttatatttcacccaggctgaatgaagaagcgctgcagcatgctatcgcttataacctcatgtttattctcggtaaagacccttcacttgccaataagcatgaatggctcaatgctacgctgttcgccgtgcgcgatcggctggttgagcgctggttgcgggcgcatcgggcgcggatctcgcagcaggcgcgccaggtatattatctgtcgatggagtttctcatcggccgtaccctctcgaatgccttactgtcgctgggcatctatgaggatgtgaaaacagcgctggccgggatgggtctggatctggaagagctgattgacgaagagaatgacccgggcctgggcaacggcggtctcggtcgtctggcagcctgttttctcgactccctggccacgctggggctgccaggacgcggttacggcatccgctacgactacggcatgttcaagcaaaacatcatcgacggccggcagatggagtcaccggactactggctggagtacggtaacccctgggaattcgagcgccataaaacccgctataccgtgcgctttggcgggcgcattcagcatgaggggaaaaactcgcgctggctggaaaccgaagagatcatcgcggtggcctacgatcagattatcccgggttatgaaaccgatgccaccaacaccctgcgcttgtggagcgcccaggccagcagcgagattaacctcggtaaatttaatcagggagattacttcgcggcggtagaagataaaaaccattccgaaaacgtctcccgggtactgtatccggacgactcgacctactccgggcgcgagctgcgcctgcgtcaggaatatttcctcgtttcggcgacggtgcaggatattctttttcgccattaccagttgtatcaaacctatgacaacctggcagataaaattgctatccacctcaacgacacccatccggtgctgtcgatcccggagctgatgcgtctgctgattgacgaacaccgcttcagctgggatgacgctttcggggtgacctgtcaggtcttctcctacaccaaccataccctgatgagcgaggcgctggagacctggccggtcgagatgctggggaaaatcctgccgcgccatttgcagattattttcgagattaatgactattttctgaaaaccatgcaggagcactatcccgatgatattgcgttgctgagccggacctcgattatcgatgaatccaacgaccgtcgcgtacggatggcctggctggcggtggtggtcagttacaaggtgaacggcgtgtcggaactgcactcccggctgatggtggagtcgctgtttgccgatttcgccagaatctttccgcgccgcttcaccaacgtgactaacggcgtcacgccgcgccgctggctggctgccgctaacccgtcccttgccgcggttctggaccgccatatcggccagacctggcgaacggatttaagccagctgagcgaaatgggggaatatcaggattatccgctggttaaccaggccgtcagcgccgccaaactggcgaataaacagcgtctggccgattatatcgcccgtcagctgggcgtggtggtgaacccgaacgcgctgtttgatgtgcaaattaaacggatccacgaatataaacgccagctgatgaatgtgctgcatgtgatcacccgctacaaccgtatcaaggcggacccgcaggccgaatgggtgccgcgagtggtgattttcgccggcaaagccgcgtccgcttaccacacggcaaaacagatcatccatctgataaacgacgtcgccaaagtcatcaacagcgatccgcagattggcgacagactaaaggtggtgttcattcccaactacagcgtcagtctggcgcagatgatcattccggccgcggacctttctgagcagatttcgctggcagggactgaagcctccgggaccagtaatatgaagttcgccctcaacggtgcgctgaccattggcacgctggacggcgccaacgttgagatgttggagcacgtgggtgaggacaatatctttatcttcggtaataccgctgcagaggtcgaggcgctgcgcagcaacggttatcagccgcgtgattactacgaccaggatcaagagctgcgccaggcgctgacccagatggggaccggggtgttcagcccacaggagccgggccgctatcgcggtctgctggattcgctgatcaactttggcgaccactatcaggtgctggccgattaccgcagctatgttgactgtcaggacaaggtggatgcgctctaccgaaccccggaagagtggaccgccaaagcgatgctcaacataacccacatgggctatttttcatcggaccgtacggtgcgggagtatgcgcaaaagatctggtatatcgacaaaacgcaactctgagcgcgtactgacaaccaggaaacgccggggcgggtggcaggagaccggccccgtcgatgagcgacccggcagcaacacataaataagcctgacggatatgacaggagagaaaaatgacggacagtaaacgcgcaggggagcctgcacaacagagtgatttgattaacgtcgctcagctgaccgcgcagtactacgtactgaggccggaagcgggcaacgcggagcatgcggtgaagtttggtacctctggccatcgtggcagtgcagggcgccataacttcaatgagcagcatattctggcgatcgcgcaggcgattgcggaagaccgcgccaggaacgggattaccggtccctgctacgtgggtaaagatacccacgcgctctccgaaccggcctttatttccgtactggaagtgctggcggccaacggcgttgatgttatcgtgcaggaacacaacggtttcaccccgacgccggccatttccaatgccatcctggtgcacaacaaaaaaggtggtccgctggcagacggcatcgtgatcacgccgtctcataacccgccggaagatggcggtattaagtacaacccgccgaacggcggcccggcggataccaacgtcaccaaagtggtagagaatcgcgctaacgaactgctggcctcgggtctgcagggcgtcaggcgcatctccctcgatgcggcactggcatccggtcatgttaaaaagcaggatctggtacagccgtttatcgaagggctggcggatatcgtcgacatggcggcaattcagaaagccggcctcaagctcgggatcgatccgctgggcgggtccggtatcgaatactggaaacgtattgccgggcactacaagctcgacctgactatcgtcaacgatcacgtcgatcaaaccttccgctttatgcatctggataaagacggcgccattcgcatggactgctcatctgagtgcgcaatggcgggcctgctggcgctgcgcgataagtttgacctggcttttgctaacgatccagattatgaccgtcacggcatcgtcacgccggcagggctgatgaacccgaaccactatctggcggtggcgattaactacctgttccagcatcgcccgcagtggggccaggatgtggcggtgggcaagacgctggtctcttccgcgatgatcgaccgtgtggtgaacgacctcggccgcaggctggttgaagtgccggtgggctttaaatggtttgttgacggcctgttcgacggcagcttcggcttcggcggagaagagagcgcgggcgcctcgttcctgcgttttgacggaacgccgtggtcgaccgacaaagacgggatcatcatgtgcctgctggcggcggaaatcaccgccgtcaccggtaaaaacccgcaggagcactacgacgaactggccgcccgcttcggcgcgccgagctataaccggctgcaggcttcggccacttccgcacagaaagcggtgctgtcgaagctgtcgccggaaatggtcagggccagtcagctggcgggtgacccgatcactgcgcgtctgaccgccgcgccgggcaacggcgcatcgattggtggcctgaaagtgatgaccgacaacggctggttcgccgcccgaccgtcaggtacggaagacgcttacaagatctactgcgagagcttcctcggggaagcacatcgcaagcagatcgagaaagaagcggtggaaatcgtgaatagcgtgctagcggcgcaccagtagagcagttgacgtactccgctgagccggagtacgtcatagttacccggcgacaccaatacaggcaccactttgtcagaacataaggaacgggacgcttcgcaaaaggtattgctgcggggactatatgaatatctatgttattaccaataataatttcatgcttgtaggtctgaaatgtatgttcagcgacaacagcctctccgtcaacagggttgtgttttcacgggtcagcgatattgccttcagcaacagcgatgtggtgattgtggagtcagagctgaacaccggcgatgccgaacgtctcaagtacctacacatttsaccggtcaatcttatctttttattaaaaccggcgtcaggaatgagcgggacagggcgtgaagcggtatgcattgacactgaattaagcggtaatgaatatctcatgatgaggcaggcgtttaaaaaaatggggatcaatctgaagagggacaagttgtcatttaccaaaagagaaacacatgttatcaatatgattttaaatggttattcgatagatgaaatttcccgtagcctgctgatctccaaaaaaacggttcagtcttttgtcggtattgttttgcataaactgaataccaccaaaataagtggaatataccgcaaaaaaaatctcatcatcgacagttttgccaggaggagcctgcatcgttaggatgccctataaactaatgatctgcttatggaaagtcactatttcatatattaagtttcaactaaattnnnnnnnnnnnnnnnnnnnnngttatgttgaacggggtttgattattggtatgcttcagaaaaaataaacatacatcatgggtgctaacatgatgaaaatatatgaaaccatagtcatcaaatgatttaagcatacaataaataatataggattatatcctctatctgtgaatggtgggcggcagaggaaaaacgggatatatatttatgcatttcatcnnnnnnnnnnnnnnnnnnnnnnnnnnnnnnnnnnnnnnnnnnnggtatgtttagtgaagacgcacactatgaatttctaaaaagatattacagagcggagttttttgaaggaagaaatggttccatttggggaataaattattcttacaatttggcaagggtgggtatgaatatgcttgaaagatatggctatgggataatattaaagcatgaatctatcactggtgaaaccatttactatgatcgtagtctgacgatactatttggtgacagaattacacaggccctgggaggtcagtattgcaacagagaaatgagagaataatgatttaatatattttttaatcgctcgttaaacattggaacttttctcagaacgtgactgcaatgtcttcaacgcatctaacatgtcgtcgccgttcagtgagcgctgcgattatttctctgttggttttctgcgccgccgcaaagagccatcaccggcagggatcgcctgtgaacggttgttatcgcgtttatcctgaacatcaatctaaattgaaatgtccgcatgtaggttatgtttcagcctttgccgaagatgtctttactccgggtctgaagttgctgcagggcttccagcatgtcgttatggtccagacttcgttgtgatttcttgccgggttgtttctttctgcgtgaggtctggccgtccagtgatggcagggcctgtgagcgggtgttgtcccgtttgtcctgaaccagctttatcatttccagggcacgtcccagacgcttgttgtcgatgatggcgccctggtccagttctcccagtcggtcgtaagtggtaaagggcagggaagtgccgctggcccggagctcaatgtcaccatccgggtattgccatacctcgatgtacttcccctgaaaacgccggttttcttcattatcttcaagcagataaagctttttatcatactgtaatgtcaggtttttcgagaccttacgctgctcgcgccaggtgaatgtcgcctgcaggttttcgccattatccagctggcgatgtacgtcaaaatcgtgacgtggcggctttgcaaaccgacggttgtaatcttccatgaactcatcagcaaaggcgtttgcagcctcaggtgtgctgataccgcggagccgcagttccttgaccaggcggtcctgtaatgtcagatgagcccgttcaacacgccccttggctgaactggtgttggcacagataccagtgatattcagctcgttcatggcacgaccaaactgagtctggccatctccgccggtggcctgcttgttgttgatcctgaagacgctggctttgtcgctgtagaatgccagaggcttaccgtagcgctccagatatccccgggtggcttcaaaataggtgaacgtggactccgaactgacgaacagaagctgcatcaaccgacttgttgcatcatcaacgtaaacgagcagcgtgcaggccggaccacggtcctcgaaccagcgatgttcactgccatcaatctggatgagttcgccggtgcaggcccgacgtgggcgtggctgatgcacacgaggtggccgtaacttacgagggatccataaaccatcccgggtcataagcttacgtacagtctctttagcaagataaaggtcatgaatctcagcaagcttctcgcaggccaatgtcgggccaaagtcggcgtaacgttcgcgaatgatgcgcagcgcacgctcagcgaggccaggcatcaactgtcggttactaggctgaccacgtcggcggttaacccgcgatagcggtccgtgttcacgatagcgctcgagtagccggcggcagtgcctgtcagagatctcaagtcgggttgctgcaagacgcgtggtaagacgccggtcgataacgtcctgcaggatcctgagtcggtttacatcgttcatcgagaaaaactccgttccgtatgccgtcatgagtctcatcctttgaaagcagcgatcgcggtggcgagactgtagcgcggacatgtctatttggtcagagacggacatctcaatttagctgttacactgtatgtctagccaatgttgaaatgtcgtgctgaaaacaaagctgacctgacgtcagtggagagtctggacaatgcctttttaaggttgagtcaggctttggaggaagaacgtggttgccaggttttctcggctatcatcagtttacgtacggtctcttttgaaatccggacaccgtattctgtggtcagaattcgccagatggctgacggattcataccccggccgcgtgagcgaataagctgcagtgcctgatctctgatggtggtgtttaactgatgattgccgggctttccacggcgccggctgaccagaccggctggccccagctcgcgatagcgcttaatcaggcgggagcactgacgacgggtgagctccatggactctgccacttctgccagcgtgatttcccgcgccatataggcttcaatcaaatccaggcgtagcgcttcgtgaagtgtcaggagcactggtttgttgtcgtccatttttctctcatctgtcggccatatcagatccacaggtgagggaagggctcatcgcttcaggctggggataaaatcctgcggactggccagcaccgggttgatcgccctgagctcttccagtgcacgctcctgagcgcgcctgcggggcatttttgtactgcgcattcgctttccttcagcctccagctcgtcctgtttctgctgtgccagcctcagaacggcacccagtcgtttgttatcaacaaccgccccctgatcaacgcaggtcagtttatcgaaaatcttataacccagtggccggtgctgatgccggaaagtaatgcttccgtcagggtaatcataaacggtaattttttcacctgctatgcgcgtattttgttcggtgggttcaatgatatacatgactttatcatactgaaaagtcagtgctttcgataaggtccgtagctcctgccaggcgaagatatcattcagctccagtggactctgtgtgaccgcacggtgcagatctttagggtattttgccggccgggagaaacgacggttaaaatcagacatgaaatgttcaatccactgattggcttcagcaaccgagctgatgttctgcaggcgcatctctttaatcagtcgatcctggagcgttttatttacccgttccacgcgaccttttgcctggctgctgttggcacaaatcaattcgatcgccagttcccggagagcccgtccgaactgggttgtgccggtacgtcggctctcgggtccgctgaccctgaacaccgcatgcttgtcgctgtaaaatgcgacaggtttaccatgtttatcaatgtattgccgggtagccatcatgtagtcaaacgcgttttctgaatcacagaatcgcaggtgcatcaggcgacctgtggcgtcatccatgaagaccagaagacagcattttggggctcttccttcgaaccagtcatggtgagagccatcgatctgaaccagttcgccgaaacagtcgcgacgatagcgcggctggtaaacccgggttcgccggcgggaatgaggacgccagagaccgtcggctgtcatccagttacggatggtttcaacggagagatatatatgatggcgttcagccagtttttcggttgcgagcgttgggccaaaatctgaatagtggcaccggatcaaatccagggctttacagcgtgtttcttcatcgatccggttgtttgcaggacgtccacggcgggaagatgcaaatgcggttgcgccatctgtccggtacagacgcacaagacgctgcacctgacgaacactgagcttaagtatgtctgctgcgtcgcgctgaagcaaagcccggtcaaatactcgctgaatgatgccaagccggtaaagttctttgtctgtcatagtcaccaacataagatcgcggtcctgtgctgagcaaaatgaaggcttagcgtacacgacgcgtgtgaattgtgctgagacgacaataacgctttgtgctgacaatacaggtgcgcataacaaagattatgttaaatattaaaataaataacataaaaatcaatatgttaagacggtaaccagctactttcccattccagcaaccagtcatggaagctttagaaacagagtcctctcatgagtttgtgatgccttaaatccatggtgagcatagaaacctttggcttcttcagtaagcgcatgaaccattatcgcacgaaccccaatgttctcagctacgcgataacaccgtagaactgcatcgtggagtaaatcggcgccaaccccttttccgtgcaatgagacatctaccgccaggcgagcgagtataatcaccggtataggatctggcatgttacgccgaagactacctgtcgcttccgtatggttaacgctaccggtggccaaagagtaaaaaccagctacttgcttcgtacccgtcttgcaaacaacgaacgttcgggcagcgccaagagcttgattttttaaacctctctgttttagccattcatcgaggactgtctctccactgacgaactcagccagctgatgagagctggataacggctcgggcgtggttatacgtcccactgaggtttccttgccagtagtttattaatggcgggctcatcctcgactggtgcatcgagcatatcgatgaactctgcatactgttcgtcgttaaaattgaaaacacggcgatcaaggatcacattctccgcagccttgcaggccatctccaggataaagtcggttcgcgatttatgaaggatctctgcagcagcatcgatgagtgctctctgagactctttagctcttaggttgagttgaacatctgatttcatacacacctctcttgtatagcaattgatatacaagaataacacaacacgaacgtatagcaaatgctatacacttcaaagtaccgataatgcgttttatgttaaatatcatacatttaatgaaagatgatggctgatcttctgcaatagtcagctcattatcgctgcaggcgtggcttcattctggatagatggagtcttttctggcattaatgccctgaagacgaacacggtcgttatcaggcaaatggatacccatcatgcgaagaataaagccgcgccacccccggttaacctgaccgttatagtcatacaggtctgcattttcttttttaagctttgaccattcatgcatgagtgttagtgcatcgagctcggtgatgtgcttcacttcatcgccgatacgtactgtgttaatgcctcttcccgtcatgatgatcccctccggcaatatcagtttcagattaacgctgttatgatgatgatttaactacacactaaaggcaatctaacgtttaatcatacctctgataataaagaacatcatggttaatgaaaacacaatcagaagccagccaaagggtttggcatcaaaaacagtagtgatgcaatcattagtacaggtaaccaacttcggggtgacaatagaaattccccacccaaaaataactaccatagtgcctgctactgcggctaagaaaaaagtggtgaagaatgcgcatccgactacaagtaacaatccaatcagttcaaatatcatattcatgattgcgctccaggtgagataactgcgaacagactgatgctggctgttttatttaacatatttccagacgcctgcaggaattttatcataaaacttccccattgccatttccgccagccggtgatccactgcggcattaaagtgctcaagttcgtcatccgtcagggaatatttatttttttctattatcctttccagagtttccttagatgtacagcggcgtagtcttaaaatccattcctgtttcgtcattggttttttatatcctgaggtgtcccggtaatttcattttggaagaagatttcctttcagccggttatgagtgaaccattttgcatatatgatgtaacctacaaaagttaagagtgcggacagactatatatccctagaacaggtaccacgtgatgaaaacgtatcatctgaccggattcatctgccagactcattaatacattgctgtatatttcagtctgaaaaaactcgtagtaaggtaccatcactacatgaagaaaaaataaattaagcagatacgtcagagaaaacgcgtgttcctgcccgttatagggcgcatactgcgcaaaggcgaaaatccagcctgtgaaaagcagaaaacacatcgtgaaatacaccaccacccatatcgctgttttcatcactgcccctcagttatataatttttctgtaacgcaaatttcttcaggcgttatggcccgtgccgttctgcttcagataatcactgatgctcaggccggacaagcgaattttatccgaaatctccctgaactgctcctcccagccgtcctgcagctccctgattgccgcgatctggaaagcaacactgaaaggcgttctgcccagtttctcggaaagccagaaaagatgcgtaccgatctcttcatccgggaccggttcaagcgcatcactcagtaaggttttttcgtcttcctgccagggatgaccggctcgcggaaaacgcggatcaggctggcggtcttttttctcccttttttcccgtctggcaacggtcggcgcttcgccttttttcatgctgacgcgtgctttcatggcgccgatggccgccacggcccgcaccagggtttcacgctcctggcgcgtgagcaggctgtcctcacaaatcagggtgttcaggttatcgatcagcgtattcagtccgggttcagtgactttcattttatgctcctgttccttgtgtggtggcgatcagtcccggctctcattcacctgaacgatgaccggcaggcctgcatcaaaacaggcctgataccagctggccacctgcaggggatcgccctcttttatccggcgtatgccgccggcatccgtcagctgcaggcaggtggtaccgtccagacggatcacgtaggccgcttccctgatggtgtaatggccgtcacccagctgcagctccaccgcgtcaccggcagccgtctggcgtaacggcagacgccggacgtcggtcagtcgttgtcgtgccgtttcagcctcgcgttctgcctggaagagcggttctgcaatgccgcgaccggcctccgtcagctcgacggccagctgcaggttcggcgcgcgcagggtgcgcagccagcccgcggcttccatgcgccggcaggaggcgcgcaggttcggtccgtacaccggggcgtccccgccctgctccagcacccgctcgatatcccgcgtcgccaccggccccggacgtttcgcatcgagggcggccagcacaatcagtacccgtcgctgcagcggcgacggcctgcgggaggttgttactgctgccatgaacgttgttctgctgtgggagcgcgcaggagcattccggtgaggcgcagatggtccctgtcggcgacgtcttccggggcacggcccgccatcgccaggtggtaccagagttcgatcgcgctgcgtgcccgggcaatctccgcatcggcatcattgcagtccgcacggtttgcccgttcaagacacgcgttaataaaatcttccgtgtcgccaagcatggtttcataactcaggtgaaagaatactttctcatccatcctgcacgctccgtctgattatgtgattaaagaagataaatcatattatatatgatttgttattcatcatttaaacatcatatcagatattattatgcggttaatgataaatatcatatcaagtatgattttgtgagtgtgacttaattatcatatcacttaccggtttcccgccgcgcagatccgatttctggctaagtcggatctctgtaacacacatgtattttccccggaaagtaatggacgtataccagcgtgacagcgtcatctgacactttcacacattcgattttccgaatatatggttgttttttttgtcttcgggcgtatgctttacgcaaccgaacaggaggaataatgccccttacagcccttaagcttttcaaaaacctgtccgatgaaacccgtctgggtattgtcctgctgctcagggagctgggagaactgtgcgtctgcgatttctgcacggcgctggatgagtcccagcccaagatctcccgtcatctggcaatgctccgggaaagcggtctattgctggatcgcaagcaggggaaatgggttcattatcgcttatccccgcatattccttcctgggctgctcaggtgattgagcaggcctggttaagccaacaggacgacgtacaggccatcgcccgtaagctggcatcggcaaactgctctggtagcggtaaggctgtttgcatctaaaaaatttgcctgaacatatgtgttttttcgaatgtatgaggtattcagaatgaagacgttaacggtgtttgacccggcaatgtgctgcagtaccggtgtatgtggttcagatgtcgatcaggttctggttgatttttctgctgatatgcagtggctgaaaggacgtggcgtacaggttgaacgttacaacctggcgcagcagcccatgagctttgttcacaatgagaaagcgaaagccttcctcgatgcatccggcgcagaagggcttccgctgctgttgctggacggcgaaacggtgatggctgggcgatacccaaaacgcgctgagctggctcgctggttcggtattccgctggagaaggtagggttagctcccaccagttgctgtggtggtaatacttcctgttgctgaatatgtcaggaggacatatgaaattattacagaatatcccgccttacctgttttttactggcaagggtggtgtaggaaaaacttccatttcctgcgcgacggctatccaccttgccgaacagggtaagcgggttttgctggtcagtaccgacccggcctccaatgtcggtcaggtattcgatctggctatcggtaacacgattcgccctgtgacagcagttcctgggctttctgctctggagattgacccgcaggaagccgcccggcaatatcgggccagaatcgttgatcctatcaaaggtcttctgcctgatgacgttgttaacagtatcagcgagcagctttcaggagcctgcaccactgagattgcggcgtttgatgagttcaccggcttattgacagacgcttccctgctgacccgtttcgatcacatcatttttgataccgcgccgacgggccacacgattcgccttctccagcttcctggtgcctggagtagctttattgaaagcaatccagatggtgcctcctgtcttggcccgatggccgggctggaaaagcagcgtgagcagtatgctcatgcggtagaggcgttatccgaccctgaacgtacccgcttggttctggttgcacgactgcaaaattctacgctgcaggaagtcgcccgcactcatgaggaactggctgagattggcctgaaaaatcaatatctggtgattaatggtgtgctgcctgaagccgaagctgaacatgacgccctggccgcggcgatatggcaacgtgagcaggaggcactggcaaatcttcctgccggtttatctgagctaccgacagataccctgttactccagccagtcaatatggttggtgtttcagcattgaagggactgctggctacccgttctgaggcattaccgctcccggtaacgaacatcctgtacacgcctgaaaacttatcactctctggcctggtcgatgatatcgctcgcagtgaacacggcctgattatgctgatgggcaaaggtggtgtagggaaaaccacgatggctgccgccatcgccgtcaggctggccgacatgggatttgacgtgcatctcacgacctctgatcctgctgcgcacctgagtacaacgctgaacggcagcctcaaaaacctgcaggtcagccgcatcaaccctcacgatgaaaccgaacgctatcgccagcatgttcttgagacgaagggaagagatctggacgaagcagggaaacggttactggaagaggatttacgctctccctgtactgaagaaattgccgtgtttcaggccttctcccgtgtgattcgtgaagcgggtaagcgctttgttgtcatggataccgcccctaccggacacacgctgctgttgctggatgcgaccggggcttatcaccgagagattgccaaaaaaatggggagtaaaggtcattttactacccccatgatgcagcttcaggacccggatagaaccaaagttctgctggttacgcttcctgaaaccacaccggtgctggaagcggcaaacctgcaggctgaccttgaaagagcggggattcatccgtggggctggattatcaataacagcctttccattgcggatacgcgttctccgttgctttgtcagcgtgctcaacaggaactgcctcagattgaggctgttaagaatcagcatgctgaccgtatagcgcttgttccggtgctggcgtcagagcccgccggtattgaaaagctcagagagttgatgagttaattttttgacatctacagggcgacaaagtcgccctgtcaggaggttttatgttactggcaggcgctatttttgtcctgaccattgttttggttatctggcaaccaaagggattagggatcggctggagtgcaatgctgggcgcgggactggctctgatatctggcgttgtgcatgtgggcgatattccggtggtgtggaatatcgtctggaacgcgacggcgacctttattgccgtgattattatcagcctgctgcttgatgagtccggctttttcgaatgggcggcattgcatgtttcgcgctggggtaacggtcgtggccgtttgctctttacgtatatcgttctgcttggtgcagcggtggcggcactgtttgccaacgatggtgcggcacttattctgacgccgatagtcatcgccatgctgctggcattagggttcagcaaaggcacgacactggcattcgtcatggctgccgggtttattgccgatacagccagcctgccgcttatcgtgtccaacctggttaacatcgtttctgcagacttctttggactgggcttcaccgagtatgcgtcggtaatggtgccggtggatattgcagccattgttgccacgttggttatgctgcatttgttcttccgcaaggatatcccaccgacttacgacctggctcttctgaaagcaccggcaaaagcgattaaagatctggcaaccttcagaaccggctggatagttttaatacttctgctggttgggttctttgtccttgagccgcttggtattcccgttagcgcgattgcggctgttggagctgtgatcctgtttgcagtagctaaacgaggccatgccattaaaactggcaaagtgctgcgcggtgcgccatggcagatcgtcatcttctcattggggatgtacctggtggtctacggtctgcgcaacgccgggctaaccgaatacctttcaggtgtgctgaatgtacttgcggataaaggactctgggctgcaacgctgggtactggcttcctgacggctttcctgtcttccatcatgaacaacatgcctaccgtgctggttggcgctctttctatcgatggaagcaccgcaacaggcgttatcaaagaagcgatgatctacgccaacgtgattggctgcgatctgggacctaaaattacacctattggtagcctggcaacgctgctctggctgcatgtcctttcacagaagaatatgaccatcacctggggatactatttccgcaccgggatcgtcatgactctgcctgtgctgtttgtaacgctggcagcgctggcgctacgtctctctttcactttgtaatgagatactgatatgagcaacatcaccatttatcacaacccggcctgcggcacgtcgcgtaatacgctggagatgatccgcaacagtggtaatgaaccgaccgttattcattaccttgaaaatccaccgtcacgcgatgagctggtcaaactcattgcagatatgggcatttcagtccgggctttgctgcgcaaaaacgtcgagccttatgaagaactggggcttgaggaagataagtttactgacgatcagttaatcgattttatgcttcagcatccgatcctgattaaccgtccgattgtggtgacaccgttgggaacgcgtctgtgccgcccttccgaagtggtactggatattcttccggatgcgcaaaaaggcgcatttgctaaggaagacggcgagaaagtagtagatgaggcagggaaacggctgaaataaccgaaagggggcgatgccccctttctcctgcctcagcgtccgggtaccggactgtccggcagcgtacagctcccttttcccagctgacgctgcagcaacaccgtgtccagccagcggccatgcttgaaaccgatgtccttcagcgtgccgatttcagtaaatccggcgcgaagatgcagcgctacagacgcgacgttcgcactgtcccccacaaccgctatcatctggcggtatccctgagaccgggcccatgttaaggcatgatcgagtaaggcttttccgcccccctgccgctgataagccggatcgatgtacaccgaattttcaaccgtaaaccggtaggcatggcgttcgcggtagcgggagagataacagtagccgatgaccgtctccccctgcagggcgatataccagggaaatccacgtgactgaacatttttcacccgggcaagcatttcctgcgtgtccggggttccgtctcgaagctgcctgtgccgtgcaggacatgatgggcgtaaatgcgccgtatggcgggaatgtgctgctcttcagcattgataatgtgcattgtatgactcctgtgacgttgactgacacactaccggaattcgcgacggcagattaagcgcttcatcttatgacctgtataaggaaatgttttaagtggaggtagggcgtcgccccacctgtcagcccgccatttcagccagcaggtccacgcctaccgggtcgtccttcagcagtggcgtcagggcaatgcgctgtgcataatgcccggcaacgtcgtcgatcagcggcagttcgcgacgggcacgggtgaccaggaacggggaggacggcttcgcggccgcgaggctgttattgatgacccacgcccagggttcaatcccggcccggcgtaagtcctgctgcagcccggccgcttccagtaccggcgtggtttcggcaagcgtcacgataatgactctggtcttctccggatcctgcagctgcatcattggcgttatcacgtgatcgtgagcctgccccatctggcgcaccatttcccggtgataggccccggttgcatccagcaacagcagcgtatgcccggtgggcgcagtgtctataatgacaaaatggtcgttggcctctttgatgatccgggagaatgcctgaaacacggcaatctcttcggtgcagggggaacggagatcttcctccagtaccgccagtccctcttcatccagaccttttccctgattttccagcacaaagcgacgatagcgctcagtctctgcttttggatcgatacggctgacctgaaggcctggcagcgagccatccagggtgtaagacaggtggctgccggatcggaggtggtcaggtggactttatgaccgcgtctggccagcgagaccgcgaccgcagccgccaccgtggttttccccacgcccccttttcccatcgtcatgaccagcccttttcccgctcggctgaggtcctccaccagggaggcaagctccggtaaatcgaccgtcgtgagcgtggctcccggatccggcagaacaagtgtgctctctgtaaacagcgccctcagggcttccagaccaaccagattaaaaggcttcagatacagcatcgaccggggaagatgcgcgaggttttcaggcatggcccgtaaggcccgttcctcccgcgccagaatactgtgcgccagcggatcctgttcaccggcaaagggaggcagcacgccattgatggcaaggtgctgatgctgcagaccgatagccgacagctcctcgtgggtatgggagacctctttcagggtcgacgcctgtgcgcgggcaaccagaaccagtcgcgtgagtgccgtatcagagagggctttcactgcgtcagcgtactggtcctgttgtttctccagccccaccagagggccgaggttcgccgcagcatcaggatgtgcatcgaggtacccgctccaggcgcccggcagctcaagcatacggatggtgtgtccggttggtgcagtatcaaagacgatatgatcatatttttcgcgcagttcatgactggtcagcagcgcggtaaattcatcaaacgccgcgatctccgtggtacatgaaccggaaagctgttcttcaatgttgctgatgacatcggcaggcatcagttcacgaacaggatcgagcacgcgatcgcggtaagcctgcgcggccgccatcgggtcaacttccattgccgcaaggttttccacggtgcggataccagtgatccggtggcccacagtctggctgaagacctgaccgacattggaggccggatcggtactgaccagaagcgttctccggccctggtcagccagccataccgccgtcgcgcaggccagagaggttttccccacgccgcctttgccggtgaagaagataaacggggggatattctgtaaaaatggcatcgtcattgttgagctcctccgggattaaggcatacggggaatgctgcagcagcgcggctgcgtgctgtcttcattccagtcctgcgtgagggaaataccggcccagcgggcgatatcttcccgggacgggagcttgcccgccatcaccagctggccgtcaagcagggtagcgggaagggactccattcctgacgtgttcaggaaggccctgatgacgggcgtattcaggaactgctgcgggttctttgccaagctgtaacgctgaatattcacaccatgctttttcgcccattcggcgctggcgttccatttgacggcttcatcgctgaccacgacgctgctggtcgcacagcagcctgcggcttcaaagatctcaatttttgacatggactgtttacctcagtgttgaatgatggggctttacactgaggtaaacgagtgaggcgggaaaaagatgcgcggttaatccatttttttatggcagcagacggaagacgcatcatccacttccacctggcagagttccgtcatcgtcttcttcagatgtttccgggcgcgaagcaggcgcgacttaaacgccgtcagcgtgatccccagctcgtcggccaggcgctgctggggacgccggttcagatcggcctcttctatcagccatctttcctcgtcaggtaaggcctgcagggtttcaggcaggcaaatctccagcgttgaaaccgcctcatggaaggcgtcaggcagcgggatctcgtcttccagcaccacgacgtctctggcggcacggtactcatccgtcagcagattcctcgccgtccggtacagccaggcccgcgggttctccatttcacagaagcggtctgcacaggcccgggcgcgcaggaagacttcctgaagcagatcggctgcctgctcccgatcgcctgtccttgatgccagaaaacgggagagctctgcttcatgctgttgccagaacacgctcatgcagttgttgaatgccgttacatcactcataccagccctcagattttgctctgattcacccgccgggaaagtgcttctgccgactctttacgttcactgtagcgatcgacgagatacgctgcatactcccgggtcagcagggtaaacttcatcagctcttccattacatccacaatacggtcgtagtacggggatggtttcatccgtccgtcttcatcaaactcctgccaggctttcgctaccgaggattgattaggtatagtaatcattcgcatccagcggccaagaatacgcatctggtttaccgcattgaaagactgggagcctccgcagacctgcatgacggccagggtttttccctgagaagggcgtactgcgccctctgatagtggtatccagtcaatctgggctttcataatgccggtcatcgcaccatgacgttcaggagagcaccataccatcccttcagaccagcgcaccatttcgcgaagttccataaccctgggatgcgtatccgctgcatcatccggcagagggagaccggaaggattaaagatgcggacatccgcacccatggcggtaagaagccgggcagcctcttcggtggccagacggctgtaggaccgctctcgaacggaaccgtacaacatcaggatccggggaggatggtcaactgtctttacacccaggcggaccccggtgagacctgtatcaaacagctcaggaacaacatttttcagttcagcaatcattttttctccggtggtgacataaaaccaggcggggcatattcgtctgcacagcactcttctgtcagaaaggcaatcaatgcagcaaggttgtcataacaggcgtggcagaacagtgttctcccctgcctttcctggcgaaccagtgagacggatatcagcgatgaaagatgatgactcagggtcgaggccggaatggcgagatgttgctgcagttcccccacgggcagtccctgacgtccggccttaacgagtgttttgtaaatatcgagacgagtggtgtggccaagttctttcagcaccatcgcggcgattttcagctccatcccattcctcgtaattttatttctatatttccagaataatagaaatatatagtgagcgcaaccacgtccataatatgactccatctccggggccttacacttacgcggcatggagaaaacatgatcggtgtttatacctctcagaaatgaggtacgtcacaatatatatggaaaaatgcatatgaatccgtcacagtagaaaccgattcccgctaaaaataaaatgaccttcatcctttgctgacgggcgcattatgtcccgccgccgggaagcccaggcaggctcgttttctgactgcctatgaatacagcaaacatacggtacagagaaatggcagagatcatcattagaaaaatgcacgaagaggactggtgtgcagtcagggaaatttatcaggaaggaattgcaacagggaacgccacctttcagaccgcagcacctgagtggctggaatggaatgaagggcatcttcaggactgccgctacgtcgccactgttgataacagagtggtgggatgggctgcgctatctcctttttcccgccggcatgcataccgcggtgtcgcagagctgagcatttatgtcagtactcattttcagggaaaaggcgcgggcagggctttgctctccgggctgataaagggctcggaaagtgcgggtttctggacgctacttgctggcatctttccggaaaaccaggccagtgttgctttacatcgcagccagggattcagggaagtcggctgccgggaaaaagtgggtgaaatgaacggaaaatggagagatgttctcattctggaaaggcgtagccggacagtgggttgctgaaaaaaagaatgcctctgttcatcagaggcattctgtcctggaagggactttattccggtgagggtgacttcagttgcggcataaacagctggcagcacgcaacagctacaagcccgccagacagcggagcggcccagtacagccactgattatcccagtatcccatggccaatgccggcccgaagctacgggccgggttcatgcttgccccgtcagcggcccgccaataaaagcatcaagaaaaacagcaatgctgataatcgcggggtttctggtcgttaggatgctcataatcagaataaaagtcatgacaccttcgatgaaaaaggcattgtacagtgatacccccatatggacccgggtcaccccggccagcagggagtggccaaagacagccttcaggcacagtgcagcagcgccggcccctaacaactgagccacgatgtaattcatggttgccctgaaagagcaggccccgatcagataaaaaatcaggcttaccacggggttaaggtgtgctccgctgtcaacaacgggtaaaaagtgggtcttccgcaacttaggtggacaaaaattgatgaaactttttagttaacaaggatctaagctgttttaagttatgtataacaaaatggcctcacttaagagacttttacagctaccgcgcgggtggcaaacctgccgacagattactggtactgatggaataaccctccatctccgcgccacacgtaaaacggcatcatgtcctgagtgcctcacgcacagtcattctgttcatagttgccggcggaggcgagtacagcatcttccatgctcaggccaggccctctggttagtcttcgccatccggcactggtactgtcgtaacccttcctgttcacgtaaaatttttgctgaatcgcttgctccctttgcaggcccgcagcagcagtcttctgcattgctgaaaaatctgcagcatcagctggggcttatcgcaggtggtgaagcagggagacgagctgcagtagcttcaggaatacagatcagcgcggatactttactgcgcagagtggttcaagctccggaacaaacagagaaccggaccaggcatgttggtattgacgagtgggcatggcatcggggccacaggtacggcacactgatcgtaaatcttgatacccatcgccccctggtgttactgccaggccgggagcaacgcactctggcggcatggttcaaaaaatacccagaaatacaggtcgtctcacgcgatcgtgggggatctatgcgttagctgctcgcgatggtgcaccgcaggcaatacaggtggccgatcgctggcatctgctgaagaatattggtgatgcgctggagcgcatgatgtacagacacatgccattgatacgactggtggccaccgagttatcccccaaaaaacagaatgctgaagcgtctttggtgccaacgtcaacgttacgtcgccctgaacgtattaaacgagagcgacgtgacaaacggtatcagcgctgggctgaggtagactctcttcataaaaagggttgtgggataagagaaatatcgcgtatcaccggactgtcccgggtgacggttcgccggtggatacagtcaaaagcgttccctgaaatatcaactaagccacccagacccgggttacttgaaccatggcaggaatggctggaagaacaacggataaacggtaaccataatgccgggcagctatggcgggagatggtaaatgctggcttcaccgggagcgaaacgacggtcagggatgctgtggctaagtggcgtaagcaggttaacagtcccgttatcgccccagttcgactcccctcagcatccagagtaagccgctggttaatgccctggcgaatgatcagaggagaagaaaactatgcatcccgcttcatcgaatcgatgtgccagaaagaaccgcaactgaaaatggcgcaacagctgtcgctcgacttctatcgaatgttgaaaacgaagaataaatcgcagttaaatcaatggttctctgacgtcagtcaaagtgggctcattgaccttcagcgtgttgcggccggtatggaagcggatgcaacagcaatacacgaagcgataagcagcagatggagtaatggcgttgtggaaggccatgtaaaccgcctgaagatgctgaaacggcagatgtacggtcgagctggcttcgagttactgcgacgacgagtcatgagccctctggcttaaacaactccacctaagttgcggaagacccagttttgcaccgttggtaacagtatagcagcggtgtttgacgttctggccatgcatgacataggcacgcatcgcgcggagctgggagacaatatctgctcgctgccggtggaacagcacatgatctattttgtgtcatcacattcggtggttatgatcattcgtattctcagccagtctcaggatacggcgcggcatgaaccctggatataggatataaccgggaacgaaaataataattaaaaacaatatgatactgatatttttttcatgaactgaattctcgcgcaacataagttaaattttatttgatcagggccaattatgataatggtgatggatgcttttgatgacacttattaattacgaaaaaaaacgctcccggcgggagcgtaagccagtgacttcggcgtcaaatgagggtctgacaagtggagctgcgggttaattctgggtgatctggctgcgatgcttttcagcctgctgctgatgaatcactgaagactgaccattattcgccttctcgtgtacaacagcggctttctcatgctcgttcatttcggaaaatgattttgctgtttcgttagaagctgctggcttggatttcatcatttttttatgcatttcagccatgtcctgatgggcagaagcgttgccgttttgcatcatttcatgggtcattgcagcctgatcgtgaccgctcatatccatcattgtcatactgtctccctgaacagcgcttttttcagaggttgactgcatctgatgggcgggtgcctgggcattatttacctggtcatgcatgttcattgtctctgcagccatggcggatgaagcgacagccataatggcaacaaatgatacaaggatctttttcatggttgggtctccggtgttttcatacccaaacaatcaacggcttataacagagaaagcatttgatctcagggctggttgatcatcacgccaggaaccgggcgattgaattatcacgctgtcctgatttatggctgattataaaaaaccgcctctgtttatcgcgtgactgaacgatgacatttttgtcaccttccgggtttctcctgaataacggtattaatccattaacagacgcacactgaacacaatttcccgcccctgctgttctgctgacagctcgccgccgtgagcatgaatgatcgaccttgtaattgataatcccagccccgcgccttccgtgttgtagaaccttgatgagtctgcgcgatagaaccggtcaaacaaacgttccagattagcgggaacctggccggacatcgtattcgtaatcatcacgttcacacagtcactgtcacgctcaatgtgtatcgctgtacaggtgttatcgggagaatacttgattgcattggaaagcaggttactgaaagcacgtcggagcatatcgctgtctccggcaacaacgccctctccttcaaccgtgattgtctttcctgtttcgtctgccaggggctcgaacaactcacgtaattcattcagttcggctgccagatccacatcatgtttatccagccgcagcagaccatgctctgaacgtgccagaaaaagcatgtcactggtcattcgtgacaaccttttcagttcttccaggttagcgaataaaatttcgcggtaatgcgaaacatccctttccttagccagtgcaaactgcgtctgcatcatcagattactgactggtgtgcgcagctcatgcgcgatgtcagacgagaaatctgacagtttccggaatgccccctccaggcgatcaaacatattattgaactcctgcatggtctcagagatttccggcggagccagatcgggatttagacgctgatccaggctgtgtacggtcatggaggaagccagactggtcatttcccgtagcggtttcagaccaatacgtgtggtcagccagcccagaaaaacagaaataaagaccagaccgatattgaaccagaacagccaggtactgagtttgtccataaacagggtgtgatacccagtatccgtggcaaccgtaatgatgacatgtttgcttttaccctgttccggcgtcacggcaacccgccgcgagatactgcggtacacggtgttattttcttccgtctggatcatatagtcgagaatatcacccgacttattaagcaggaccgctggaacaacagaatttttggcatagagttcaacaattttttcattttccatgttttttatagaaatgaataagccattgtgccccaccatcgcatcgtttattttttctgataatgacttaatatccgttttgttcctgaacgtctctgttttaagaaactcttcggtgagctgaagtttacctgtcagaaaatcgcggtcctgattatcgaaatagccattcagggtgctaatcaggataaaacttgataaccaccataccgtaagcatcaccgcagaaaaaatcaggctcaggcgtgtggtcagggaaattttgaacctcactcttctctgatctccaggacatatccggcaccgcgaacggtatggatcagttttggctcaaagtcatcatcaattttacttctcagacgtctcacggcgacatcaatcacattcgtatcactgtcaaaattcatgttccagaccagggacgagataagactcctgggtaacacttctccggtgcgttgcagcagcaactcaagcagaacgtattctttaccggtgagatggatcttcttccccgaacggatcacggtccggcgcaccatatcaacggtcatatcggcgatggtgcagactgttgcggcctgcgagcgtgcccggcgcagtagggttcttacacgtgcaaccagctccgtaaaatcaaagggcttaatcaggtagtcatctgcgccaagctccagtcctttcactttgtcccgcacgttgtcctttgcggttaaaaacaggaccggttcttcgtgcccggactccctcagtgcgctgatgatttgccacccgtcgaggaaaggcagcatcacgtccagtattatcaaatcatactgtcccttcgacgcggccccgagaccatcgcggccattattaaagagatcggcctgatagccttcctcaaccagtccctgctgcaggtaacgacctgttttttgttcgtcttcaacgattaaaatacgctgcatggtcaactcgctgatatgaaagtaaaaatctcacgcatgagctttggctgtcccctagctgatctgagacggagcaagcattccaagccacgctacggcgcccagaatgataatcgcaacaacgaattctgtcaggatgctgtttcgcatcagggcaacgctgcgatcataattcccttccctgaccataacttcaagccggggacccaggtgaaaccggtttgctgcagccagaagaagcatcagaacaaacagagccgtcttggcaagcaatatcctcccccaggaactgttgaataagggagttaagttaccctcagcaatatacagatagttgaccagcgcactcaggatcagggctacaacaatcaccgttcctgccgtggcaaattttgccagggagtcagatatcacaatgacgctctgtgcattatgctcgtttctgcgcatcagcaggatagcaaatgcaaccagagcacctgtccaggcacctgcagcgccgagatgggtcagatcgctcagtaaatggagatagtaatgcagaccgtcatgcataacggcgtgtcctccccaggcaagtgtagccagcgccacgcccccactcatcgtcatcagcaggcaggacaatactctcttattagtgtaaaggaacaaagcaccgagtgtggtaaacagggcacagagtctgacaatccagctaatacccacatcagtttcttctatcaccatctcgataacatggatggataattctctgaggtcagttactccactcatggcattagataccaggagcatattaatgccagtaagaatgatgcctgtaacaacagcaaaggttataaacgacctgaaattagtcaggttataggtttcatgtctgacaccgcttattccatatatctgaaaaaatggcaatccaaatattaccatcaaatccagataaagaagaaaacgaataacaatcataatcaggtcgttcataatattacttcactgtaaaggtgtaattaccggtaatagggtgcgtatctgaagaaaccgcgcgccagtcaacacgataagtgccagcgggtaaaggctctcgcggaataatgaccatcgatttagggtcagcgcctggcgccacttttgccgcgaccggcatcggagaatgtgatgacatgcctttcatacccgtcatcgttaattttgcacctgagaatttcacggtcagattttccgagaaattaagctgaatcttttccggggccgctacggctgaatcagcctgtggcacagagctttttaattccggatgggccatagcagagaaagcaacgcccataacgaggccacctgtaagaatggctttatttaaaatcgacattttatttacctgtttagttgagtgttttatatcagtgcgttaaaaccagattctggctcccgccaggaatactacctgatggtctttctcaccttctcttttcgccatatcggatgttttcccgtaaagttgattccaggaaacgcctatatagggtgcaaactcacggcgtatttcatagcgcagtcggagccccagctctgtgtcagtcagtcccctgccgcgaccccgcgattcatcatcctgactgtagaaattcacctcataggatggctggagtatgagccggttagtcagtaaaacgtcgtattctcctcccagacgaagggctgcttttccgccattactgacaaaacccgtaatttcagactcaaaattatagagtgccagcccctgaaaaccgacagcagcccaggtccgggcagaagcaggtctgaaatcctgcctgacacccgcaaccaaatcccaccatgggccaaccgcatgtccccagagtaactgcgcttcagccgcctccgtttccccattgcttcgttcaccttcactctttagccaaatccgatctgtgtcgcctccaatccagctgttaacactccagctgaaattgttggtgttatccgaccgttgccattccagttgatccagcagaaccagataattaatcgcactgtcgtgaatcgcatgcccctgtaaattgccgaatgcagccttccggtcggcatcggtaacaggcggaattggcgttctgctctcagttacaatgggctccattgacgtcatctcagtgaaattctcatctgctggcatctgcatggcagacatgtcgtgcccggcgtggggatctgcagagacggagcccgccgcaatagaaagctgtgaggtaaacaaaccggcgaccagaacaggtatggccttcaaatttctcttcattcgcatcattcctccacccggacttcacgaaacattcccatttccatgtgatagagcaaatggcagtgatacgcccagcggccaagcgcatctgctgtcactctgtaactgcgttttgtaccagggggaacatctattgtgtgtttacgaaccatgaaattaccgttttcatcttccagatcgctccacataccatgcaggtgaatggggtgagtcatcatggtatcgttgatcagcgtgatcctgagccgctcaccgtatttcagcagcaccggtgcggcatctgaaaacttgattccgttaaatgaccaggcaaacttttccatgtggccggttaaatgcagttctatggtacggccaggttcacgtccgtcaggatcctcaaagcggcttttcaaatccgcgtacgtgagaacctttcttccgttatttcgaagaccaatacccggatcatttaatttcggagagacgctcatcgcctgcatatcaaccagtgggttatccgtttctgacgcaggatgactttgcatacccggcattccggccatccgggaatgatccataccggccatgctgctgtgatccatgggcgcggaggatgtcccgctatccggaaggtcagcaccgtccatagacatcatctctccgctgttatccatgcctcccatctggctgtggtccattcctgccatatcatgtcccattccccccatacccatatcttccatggtcaacagaggacggggatcgagggggggaacggcagcacttaacccttctctcgtggccagtgtccctcgagcgtaaccggtcctgtccatggattgtgcgaagatggtataggcctcaccctgaggctccacaatgacatcataggtttcggcaacggcaatcctgaattcgtcaacggtaaccgggtttacatactggccatctgcagccacgaccgtcattttcagcccggggatacggatatcgaaataggtcattgccgagccgttgataaaccgtaagcgtatcttttcaccgggacggaacagtccggtccagtttttcagcggggcctgcccgttcatgagataggtgtaggtgtagccactgacatccgcgaggtcagtcggattcattttcatttcagcccacattttccgatcggcaatggtggctgacagccccctggtattcacgtcgcggaaaaaagagccaacggttggtttattgaaattgtagtaatccgactgtttttttaattttttcagcaggctgtgaggattttcatcggtccagtcagacaacatgaccacatgctcacgatcgtaagcaaacggttctggctccctggcatcgatgataatggcaccgtataccccctcctgttcctgcagaccggaatggctgtggtaccagtaagtcccgttctgcttaaccttaaaggtgtaaacgtaggtatcatcaggctctatgcccataaaactcagccccggaacaccatccatattggccggaagaataatgccgtgccagtgaatggacgtctgttcattaagacggtttttgaccttcagggtaatggtgtcaccttctttccagcgaagaacgggccccggcaggcctccattgattgttttggcctgacgctcactgcccgtgatattgacggccgtttcaccaatggtcaggtcaaactgagtaccctgcagggatgcggcaactggcaggctcagactggaacgcgcattgaaactccatacgccaagacttccggctacgccagagagggttaaccccttcaggaaagttcgtcgagacgttttcaacagcatgcgcattcccttatttaaagtatggttactgacagaattcgagaaccgatttaaattaaattactggttcatccacttacaatgaaatgaatctagcacaccttaagaaacaaattcattacaatcgtgtaatgtacgtggctgtattacatttacgtcatcttctccacaggttgatttttttatatatgatcataaggacatcttttatgtacctcagaaggtaattacacatgaatatattaatcacgaccactgcgtttacagctttattttgtggggcagcttttgctcagtccagtgatattgcccatgaagcacatcgatttgttaataatgcctcagccgtcagtcatgtgaactcctcgacgcatgaaaacttaccggacagggttaataaaaacaacacgccctcattctctgaaatgaatgaacatgaaagggccattgttgctcattcatttatgaacaacagcgcgtcctatgcgcatcagaaaatgattgaggaacataaaaaaatgctgtccggcagtgatgcaaattcaaagacctcgtcttcttcttttaacgaactgaatgccggagaaaaagccgctctcgtgcatgagcaggtcaataatgccggtgcggaagcacatcagacgcaggcaagaaagcttcgcgggctgtattcgaccaggtaactgcaggcgggttagtgcttagcgtcaggtgcgcagcagggctttactgacgggttacgtagcaggacatgagccccatattgctctgccgtaacctgtttcagtcccgttaatcatcaccgtcgggctggtcatacagttcccagagcttcaggagcaaacgggaaacaagatatgttacaaaaatgacgaccatcaacggtgctcccgattaactgacagatgacacgcctcctgaaaacccctagcatacgccgcagtgttcatgctaacggcgaattccagtaaatgtattctaccgatgtcgtaaaagaaaatgcctacctttcagccacccgctcggggctggaatcgaacgagatcgctactcttcagcgctccttgccttcccggtttaatctgcggcatttgaaaaaaaatgaatcattaaaactcgtactgcaaaagaaagcgggaaaatcacgtgtcgtggcctataaatttacgtccggttcatttaattacacggcgtatcgtatatcagataaaaagttctataacctttccgatacttccgggaaaggcagtctcgattatccgttaccggccacagcaagactcagttcgcctttcaatcctgcaagacttaacccggtatcgggaaaagtgagtccccataatggcattgattattccatgcccatgaacacgaaaatagtcagcgtcatcgacggaaaaatcacccgggccgaatacaacagtaccatgggatattttgttgaagtaacgggaaaagccggtgttaaaactcgctatctccacctcaataaaatactcgttactaaaggggccagggttacccggggagacgctattgcgttatccggtaacagcggacgttcatccggtcctcatctgcattacgagctggtcatcaataacaatcctgttaactcactggcgttccgggcagcggcacccgctgataacaaacttgaacagcatgcctttgcgcatgccagagactacgaacgatacctggaatgataacggggccgcgacgcggccccgtctgccggattaattttttttatcgttttcacttccttgatgttgatgatctccatgccctccgtggccgtggaaaagatgcattagcgggcagaccagcaataacagatatggccagtaacctgccacatgtgaccagtgttcgcgcaggagggcaaatgccgcaatcgcggcgacagcaataagcgcataggtggtacttttcataccggactccttctgttagtaacagacccttcattcagggttatttcccgagcctgacacttttcagacgcaacgcatttgcaatgacgctaacggaggaaagggccatagccgccgccgcaataactggcgacagcagtattccatacacaggataaagcagacctgcagctacaggcaccccaagagcattgtagataaacgcaaaaaacagattctgccggatatttttcatggtgatttctgacagatgacgggccctgttgagtatcatcaaatcgcctttgagaagggtaacgccagcactttctattgccacatctgtacccgttcccatggctatacccacgtcagccgctgccagcgccggggcatcattcacaccgtctccggccatcgcaaccacatggccagacgctttcagtcgggttatcactgcttttttgccatccggcagaatcccggcttcaacctcatctattcccagtttccgtgcgactgcttcagcagtaagctggttatccccggtgagcataacaatgcggatccccgcctgacgcaaagctttaagcgcatccggcgtggttgctttcacgggatccgagatagctatcaggcctgcaaggttcccgtctgtggccacatagataacggtagcgccttccatccgcaacgtatccgcaacggccttttgattatcaataacgatactgttttcctgcatagccagttcattaccaataacaacccgttgaccttcgacatcgcctgagacacctttccccgacggggcattgaaattactgacggcaggtatcacgatccccttttcatgcgcggctctgacaacagccatacccaacggatgctgcgaacctttttccactgcagctgttacacgtaaaagagatatttccccacccggactgagactgataatccctgtcaccgtaggcgaaccttccgtgagcgtgcctgttttgtcgacaaccagcgtgtccactttttcaagacgctcaagggcttcggcattcttgattaacaccccggcctgggcgcctttgcccacccccaccattatcgacatcggcgtggccagtcccagcgcgcagggacaggcaataatcaggaccgacacagccgcaatgagaccgtgcgccatcctgggctcgggcccccagagagaccagatcaagaaagcaacaaccgcgataagtatcaccagaggaacaaaccagcctgaaacgctgtctgccattctctggatgggggcacgcgaacgctgtgcatcagcgaccatctgaacaattcgtgagagcatcgtttcatcaccgactttctctgcacggatgataagactacctgtctgattaatcgtcccccaatgacagggtcacccttcgttttggtaaccggcatagactccccggtcaccatcgattcatcaacggttgttttgccttcgatcacgataccgtcgaccggaatactctctccaggtctgatgcggagcttatcgccaggcaggacatcttccgcattaatatccgtttcatgaccgtcatgatccagccgtctggcggttttgggggcaaggttcagaagcgcagtaatggcgcctgaggtttgttcccgtgcccgcagctcaagaacctgtcccagcagaacaagcaccgtaataactgctgcggcttcaaaataaacggccaccaggccatccatgtttctgaacgatgcaggaaaccaggaggggaagacggttgcaatgacgctgtaaacccaggctacgccggtccccattgcaacaagggtaaacatattcagggagcggttacgtaacgacattccggcccgggcgaagaatggccagccacaccacaacacgacaggggaggccagaagcaactgcagccatgtgttgtactgtggcggtactgtattcctcaagtcgggaaacagatgagatcccatttcgagtaccagaaccggaaacgccagcaacaaccccagccagaagcgtcttgtcatgtcgtgaagttcatcactcggccccgtggatgccgtagctacgagcggctccagtgccattccacagacaggacagcttccgggaccactgcggcgtatctccgggtgcatcggacatgtccacacaccttcagaattctctttttccgcctggttgtgaggctgttttatctgatcagggctgacttcgtgatgatcgtggtgatggtgatggtgatgggaatgttcactggcatcttcggtaagataacgatcgggatgggctttaaatttactctcacagctggcggagcagaaataaagttggtggtcctggtatcgaatgctgctgtgcgccctgtcgggcaggatggccatcccgcacacgggatctctcaccttatgcaatacgtggccctcgtccggggataatgtctgctcagaagcagtctggttgttgtgttgcactgcattgtcatttttcacagtaactctccttatgcataccgaagcatcttctgtcttcagggtatgtcatggatgcgattaccacgaatatcgccggcacaggagtgcctgctaccggcgtcccgttatcagccgttccgctgactattcgattcgctggaagacttttttacttccatccggtgagaatgcgataacatcgtaagcctcttttcgggctcccatctccattccaggacttcctgctggcataccgggggtggcgagaccgtatatacccgaaccagactgcattgccttatgtatcgttgtcgcaggcacatggccttcaatgatcaaattaccggcaaccgcggtatgacaacttcgtagtcctgcaggaatagcatgcttttctttcagggctgacagcgcctgatcattcatgacgtgagttcgtacttcaaacccgtctttttccatcgctttgccccacagggaacaacagccacagttttcagatttgtacatatcaatcactttttcactcgccatcgcgggtagtgaaaggccgagagccagcgccattagaaccacttttttcatactcacctctgtatattatcgatataaaccctgacgtcagggtgaatcagtaaagaaggacacccacagggggtgccctttcaggttcaggacacgctttttttatgtctgcgcagccagattaatttgtaggcggcaggaataatgaacagggacagcagcggagccgtgatcatcccaccaatcatgggtgccgcgatacggctcatgacttctgaacctgcaccggttccccagagtattggcagcagacccgcaatgatcaccgccacggtcatggctttcggccggacacgcagtacggcaccatgatagagggcttcatcaaggccttccggtgtgaacgtctctttacgggacaattccgggtgcgcttcaatggcatgacgcagatacatcagcatgaccacgccaaactctgctgccaccccggccagggcgataaacccggttccggtcgccactgacatatggaagccctgccagtacaggaaccatatcccgccaaccagggcaaacggcaggctcatcagaataagtaaggcctcatcagcccggcggaatgccagatataacaggatgaagatgatcatcaccgtcatcggtaccatcagttttaatttcttattggcgtgctcgagtaattcaaactgtcctgagaatgccacactggtccccggtctcagtttcactttctcactgatggccgtcttaatatcgttcaccaccgacaccatgtccctgccgcgggcatcaacataaatccagctggctggccgggcattttcggttttcagcatggttggtccggaaacgaccttaatatcggcaacatcgcccagcgtaatttgctgcttcattggggtcaggattggcatctctctcaacgcctgcggactgttacggtaatcctgcggatagcgaatgttaatagggtaccgggccacgccttcaaccgtctcacccaccatagccccaccgattgctgaagagacgaacagctggacgtcgcccacagtcatcccgtaccgggaagctttctcccggttgatatcgatatcgatgtagcgcccgccctcaagtcgctcagccaggacagacaccacgccaggcacggttttggctaccgcctcgatactctgcgccgtcgcgtcgatatcggacagaacagtcccggacactttgatacctatcgggcttttgatcccggttgagagcatatcaatacggttacggataggcggcacccagaggtttgccagacccggtaaacggactgtcctgtcgagttcatcaataatcttgtcaattgtcatgccgggacgccactgatcctcaggtttgagctggatcgtggtttccaccatttcgagcggcgcggaatccgttgcggtctctgctttaccggtcttgccaaatacagaagccacttcaggaacgcttttgattaacttgtctgttgtctgcaggagcgctgcagcttctgccggagagacgccaggcaaggtcgacggcatatacagcagatcgccctcgttaatcttcggcagaaattcaccgcccacctgactcagtggccagataaccgtgaaaatggacaaggccgcaaccagcagggttgtttttggccagtggaggacccgcagcagcaaaggatgatacgctttgatcagcacccggttcagggggttacttgtctcggcaggaattttcccccggatccagaatcccatcagaataggaatgacgatgatggccagtgcggccgctcccgccatggagtacgttttcgtgaatgccagcgggccaaacagacgaccttcctgcccttccagggtaaagataggaataaaggacagggtgatgatcagcaggctaatgaacaacgcgggtcccacttccacggaggcgtcggtaatcaccttccagcgggtggcgttgtcaatctgctcacccggatgctgatgatcccactcctcaagccgtttgtgcgcattttcaatcatcacaatggcggcatccaccatcgcaccgacggcaatcgctatccctcccagcgacatgatattggcgttcagtccctggaagtgcatgacgataaaggcgatacacaggccaagtggcagagaaataatcgccaccagggcagaacggacatgccagaggaacagtgcgcaaacgacagcaacaacgataaactcttcaagaagcttgtaactgaggttatcaatcgcccggtcgattaactggctgcgatcgtaggtggtcacgatttcaacgccttccggcaggctggccttcagcgtctccagtttatccctcactgccgtgataacgtcgcgcgcatttttacccgaccgcaggatcaccacgccgccagcgacttctccctggccgttcagctcggcaataccacgcctcatttcgggcccggtctgcacgcgggcaacatcccgcagataaaccggcacgccgttctcacctgttttcaggacgatgttattaaaatcatcaatgctctgaagataaccgctggcacggaccatatactccgcttcggccatttcaacggatgagccaccggcctcctggttagacgattcaagtgcctgtttcacttcgggcaggctgataccgtactgggacagttttaccggattgacctgaatctggtactgtttcaccacgccgccaaccgaagcgacctcagccacgttcgggatggttttcagctcaaatttcaggaaccagtcctgcagagagcgcagttctgaaaggtcgtgttttccgttgcgatcgacaagggcatattcaaaaatccagcccacacccgtggcatcaggaccgatttcagaactcacaccggcaggcagttttccctgaacctgattcagatattccagcacgcgggaacgggcccagtacagatcggtgccgtcttcaaaaatgacatacacatacgaatccccgaactgtgaaaaaccacgcacggtttttgcgccaggtacggacagcatggtggtggtaagtggataggtgacctggttttctacaatctgcggggcctggccgggatagctggttttgataatgacctgtacatctgacaggtcaggcaaggcatcgaccggcgtgttaataatcgtccatgtaccccagatgctgagaaacagggcccccatcatgaccaggaaacggttggcgacagagcgccggataatccattcaatcatcgtcgtctcctcagtgccctgaatgcatatttacaggctggtcagacattgctggcatactgctttctgttttttcagggtggcgcatacgttccagcgcgcccgtaatattggcttcggagtcaatgaggaacaggccactgaccaccacggtatcgccttcattcaggccggaaccgatgccggactgttgctgtgattcatgcagaacgtggatctgtttcggcacaaacttgccttcatcatcaacagtaatcacgcgctgttctttgccggtatcgataacggcctggcttggtatcagcagcatctcctggctcttggtattcagtttcagataggcattcatgcccggcttgagaaactcatccttattagaaacctggagacggacctgaagcgtacgggttgtctgatccacgctgggaagaatgttccatttttcgacatggaatgttttatccggataagccggtaccgaaatttcaaactgcgacgtatctttcagcagatatgcgatagattctggcactgcagcgctgatccagaccgggtccatcccctgaatctgagccactactttatctttcgaaatattcatgccggtgcgcaggtcaaacgcagtaatgacaccatcaataggtgctttaatggtaaaacgggtctggattgtgcgggttgaacgcagcctttgaatatcctcttccggcataccagccagacgaagtcgctccagaaccccttttatctgggttgacgtaccgcctgtaccggataacagcaggaactcactttgtgcctcaacccattcaggaatggtgatatcgataagcggagtgcctttcttcacatgatcgccaatcgtcaggggatacactttttcgacgaaaccgtcagagcgcgcctgcacaatgacaaactgatactcgttgtaactgacattagccgggattgtctgggaataattcagcattcctcgcgtgactttttgcgtttttaatcccagattctgaacctgcgttggatcgatacggatcccgccactgcttttatcgccactttcatcagcatatttcggcaccaggtccatatccataaagggagattttccgggtttatcaaatttggtatccggtttcatcgggtcataccagaaaagtacctttcgctccggtgccttttgttcggtttgtactgttttttgtgatgagtttacatactgccaggcagtaaccgatatcagcccccctgctatgaggctgctgataattattgcagcatattttatctttaaagaagccatacaatttctcgctgaaaaatcaaaacacctggcatatgcgcccgatcattcattcacagtaatcccttaatgaatgttcaggcgcactggatgtattcgctccggactgataatcaggattgcgtaacgttaatgcttttgagtaaggagatattgccctgctgaataaacgagaaatcgacatggttgccggttttcagggcattgatagcgtcgtctgcattaacaaaagtgaagcgcatggtcattgcaggccagcccacagcagggattgcttcgtgcgaaatggtaatctttttactattcatatcaatgtctttaacgacaccggtgcccttgataacctgctgtaccgaagcatcactggcagcattcatatcgccatgctgatgtgtttcagcatgaagaccggcagaaaacatgacagagaaggcaccaaataaaacggctttaagtgaattacgcatttttaatttcctgattaattaaataaatttactctacccaaccgccacccagcgcggtaaacagattaatttcgttaacctgtcgggaataggtaagatcgagaatggtttgctgcgtagcgaagagggaacgttctgcatccagcacttcgatgtaactgacagcaccacttgcatataatcctctggcacgctggagagttatctgaagtgaatcaagataacgctgctgtgactcaagttgctggctaagactgtcgcgcagcgcaagcgtgtcggaaacatccttaaaggctgactgaattttttgttcgtaattaaccaccgattgttgctggcgaatttcagccagcttcagattggctttattcctgccagcattaaaaataggaatttcaattttagggataaaattccacattccacttcctgacgtaaacaggcttgacagctccgtactgcttgcggaaagaccactggtcagggtaatggaggggaaaaaggccgctcgcgctgcgccaatattggcatcagccgctttcagctgatattccgcttccataatatccggtcgctgcagcaaaatttgtgaagatagatttggtggcaattttactggtgcgatctccccgcctttcatccctttttctgacggaagtgcgcggtacgttcccagcaccagttgcagggcattgtttgcctgagccagatcgccttctcgtttggctatttcggcgcgggtactttcgatttgtcctctcgcctgttcaagtgccagaacgttcgtactcccggtcacgagctgttgctcaacgaaagcataggactgttcataatttttcagcgtttcccgcgcaatacggagttgttcgtacgccagttgctggctgaaatagctctgtgaaacgttggagaccagcaggatgtgtacggcacgacgggcttcttcgctggcaaagtagttctggcgatcagcctcactcatgttcttaagtttgccaaaaaaatcgagctcatagctgagctccagacccgcgtcgtactcctgtgtggtcggcttgtcacctttcagaccaccgttgtatgtgatcccggatgaggcattcagttggggataacgatctgcatccgtgacgttgaactgggcccgggcctcttcaaccttcagggcagccattctcaaatcacggttattattcagggcttcaccgatcagcctgctgacctggggatcgacaaaaaagtttcgccagcccgtatcctgatagctgtttaccgcaggcgtcagactgtttttagacaatgaaaactgctggggaaccggagctggcggacgctgatattcaggtgccagagaaacacaaccagccaggatgaatatggtactgatgctgagtaattttaatttgaacataacgcttctcgtacaggcagacctggtaaatggttcaaacgaaatccagagtattgatagggatactttaccgaacgctctctgtttgccgggtgacaggataatgacaatgttgtcatttttgctgtaatccgttgataacgatcgtgggcgcaataaaatgacattagcagccagccggggagcatgatgaaaatattaatcgttgaagacgaaattaaaacaggtgaatatctcagcaaggggctgacagaggcggggttcgtcgtggatcacgctgataatggtctgaccggatatcatcttgccatgacagccgagtatgatttagtcatcctggatatcatgctgcctgatgtaaacggctgggatatcatccgtatgctgcgcagtgccggaaaggggatgccggtattactgctgacggcccttggcacgattgaacacagggtcaaaggacttgagctgggtgcggacgattatctggtgaagccctttgcgtttgctgaactgctcgcccgggtaagaaccctcctcaggcggggaaacacgatgatcacggaaagccagcttaaagtggctgacctctcggttgatctcgtatccagaaaagtcagccgcgccgggaaccgcattgtgctcaccagtaaagagttcagcttgctggaattcttcattcgccatcagggagaagttcttccccgctccctgattgcctctcaggtctgggacatgaattttgacagcgacactaacgcgattgatgtcgcagtaaagcgactccgcgctaaaatagacaacgattacgggacaaaactgatccagacagtgcggggcgtgggctacatgctggagatcccggatgcatagcaaaccgtccagacgacctttctcactcgctctgcggctgaccttttttatcagcctgtccacaatactggcgtttatcgccttcacctggtttatgctgcattctgttgaaaagcattttgccgagcaggatgtcagcgatctgcaacaaatcagcaccacactgagccgtatactccagtccccggcagatccggatgaaaaaaaagtaagcaaaataaaggaatcaattgccagctaccgcaacgttgcccttttgctcctcaatcccaggggtgaagtgctctttagctcagctcagggggcggcactacgcccggcagtgaattcagcagattttagcgagcacagccgcgcacgggatgtctttctctggacggtggaggatcctgcgggaccgatggataccgggtccgaaatgaagatggaaacatacaggattatcgcctcctctggtcaggcgatatttcagggcaaacagcagaactatgtcatgctgactggcctatccattaatttccatctccattacctcgatgcgctgaaaaagaacctgattgcgattgccgtcgtgataagcctgttgattgttctgatcattcgaatcgctgtccgtcaggggcacctgccccttcgtaatgtcagcaatgccattaaaaacatcacctccgagaatcttgatgcgcgactggaaccgacacgcgttcccattgagctggagcaactggttatctcgttcaatcatatgattggaaagattgaggatgtctttacccgccaggccaatttctctgccgatatcgcgcatgagatcagaacgcccatcaccaatctggtgacgcagactgaaatcgcactgagtcaggatcgaacacagagggaacttgaggatgtcctctattccagtcttgaagagtataaccggatgaccaaaatggtcagcgatatgctgttcctggcacaggcagataataatcagctgatacctgacagggtcatgtttgacctcagagcggaagtcatgaaagtcttcgagtttttcgaagcctgggccgaagaacgcaatatcacgctcaaatttaacgggatgccctgcctggttgagggagatccacaaatgttcagaagggcgatcaataatctgttatccaatgccctgcgttataccccggaggacaggcaatcaccgtctcaataagagagcaggagagcttttttgaccttgtgattgaaaatccggggaaaccgatccctgaagaacatttatcaaggctgtttgaccgtttttatcgggtggatccatccagacaacgaaaaggagaaggcagcggcatcggccttgcgattgtgaagtcaatcgtggaagcacatcacggaagagtgcaggtggaatcagacgtacgctccacgcgttttatcttatccgtgcccagactggagaaaatgatcccggaaacccaatgctgaaaataaagatgtaaatgacaaagat

SEQ ID NO: 285 - DNA, 110226 bp, Klebsiella pneumoniae
  modified_base (46834)..(47108): a, c, t, g, unknown or other
  modified_base (56892)..(56900): a, c, t, g, unknown or other
  modified_base (66265)..(66265): a, c, t, g, unknown or other
  modified_base (82536)..(82553): a, c, t, g, unknown or other
aatccgacctcaacctgtcgttcccctaacggcttgacgatcgatgcccatgcttatcgtttcattaagatgcgtattaaaaaggttggcaacccaacctggaacgccaaaatgttctggatcggcgctgatgaaaccggctggaatgctggtcgctccgtggttatcaatgaaccggaatacgatgacaagggtattgcgattctgaccctgcacgacattgagtggcgagattcgacaacgattcgtcgtttccgcttcgatttcacttcaggtcaggatgcggacaattacctgttattcgactggatcgctgtcggtcgaccgacgccgggcgcaggcatggccgcgttacaggaagagcagcaggctcgtgcgaatgcggattccgccgaagcgcaggcgcgcagcacattggctgcacaaatccgcggttcctctgaaagcggaaatctggacgacattcgctccggtctgatctatcaggagaaaaatgctcgtatcaccgccgatgttgcggaagcgagtgcgcgtgaatccttgcagactgaattcaacagaaacaaagcctctgttgcagaagagctgcatacgctgtccactgaacaagcttcccaggcaagcaagattaccgggttgcaaacaagccttggccagaaggccgatgccagtgcggtacagacaatttcccagaaggtcgaagagcagggcaacacccttaaatcacaaggggcggcattgtctacgctggataatcgcgtaggaagtgttgagtctggtgtatctgcgaacagcaaggcgatcacgggtctgcagtcgaccgtaacacagcaggataaaacccttagcagccagagtgaaagcatcaccaccctgaataactcgctgagcgatatccagagcgataccgatactgccaaaagcaacccgagcaatttgctggttaacgcctcctttgagcgtgacctggcagggtggtctgcagggaacagcgtatccagtattatcaaggcgagtgcgccccattctggtagcaaaattcttgtttgcgccgccggaacggtgcaaatcacgcaatctgtaagcgtcgtcgaaggacggacatacaagctgtcctcttttgtgcggtgcaccactgatgcggtgatcagcagccctggcaacaacaaactgcgtattggcgcggccacgttgctcaaagagattccgatccgtccggagaatctgcccaaagatgaaacatggaaagaggtctctgatacctggaaggcgacgctgaccggtaaagttgacgtatcgatcatgtcttctctcaaaaccggttctcagtacttcgatgatgttggttttgttgacgtcactgatgctctggcgattgaggcgaacgccagtgccaccaatgctttgacctctcgggtatcgtctgttgagggcaccatcacaagtcaggggcaacagatcacttcgatgcagaacagcatcaagaacaaagctgacgcctcagctgtgactaatctgacaaaccgcgtaactgctgccgaaaatcagatctccagccagtcccagagcatcaccagcctgtcaaactcgctggataacgccaatgctgatgcggatgcttcgaaagcgatcatcggcaacatgctcaaaaacaactcttttgaacgtggtttcgaaggttgggagtatgttggttggactctgctggaggcccaaaaccccaaatcggggaaatacatcatccaggcgggcaaactggcctctggcggtgactcgggctgcaaccaaacgatcgagctgcaggctggcaagacttatcgtatcggcgcatgggttcgcaaatccgctgacttcaccatcaataatgccggcaacaacaagattagtcttcgaaacgcagatctgacgccgttaaaggatatcccgatcactggcgccgggctgtcgactaactgggcgcttattagtggcgagtatacgccagccaaaaccgcgagcgtggttgtgtctctgcgcgcaagtgtcgcttccggctatatgtatctcgatgmcgtcttctgcgttgamrwragmaatgagaaggcgattgatgcgacgtccaatgcgttatcaaccctcaacagtaccgtgacccagcagggaaaagacattacgtcgaactccaacagcatcacttcgctgtcaaaccagatggttaacggccgccagaacatgtgggtgcgtagcgtatacaacgtacaactggcgaacaatgccaccgagccgacctttagcgatatcaacggtaaggcgccaatctcgatcgatgaggttcctgacgcggcaaaactggactttgcgagcgccggcagttacgtgatcgcgcattacaaagccttcgtgaaagtcaatgctgataccaccatcactatggcaccagggtctcgtgtttttgatgatacgggcgccgtgtacgtgaacggtgttagggttgcctttggtaatgcgagctggaatacggttagctttgatctgaaagctggctggagcacggttgagttcctggtgaaccaatggactggtcaggcttacattaacctcggttttaaactgtccgagaaggtagcccagctgaattctgctcttgggatgaacgcgctttcgaatgccattagcgccgtcacctcaaacgtcagcaccgtaggtgatcgcgtcacgagcacctcacagagcgttactgacctgcgaaatagcctcgaacagaccaacgctaatctggcgaataaggcagatgcacaggcgctgtctacgctgcaaaatacggtctccaagcagggggatacgatttccagccagggtaacagcatcacgaacctgaataacaccctgaccgctgccagaaacgccggtgacaacctgatcccgaactacgatttcctgcagggtgcaactgcgtgggatatccagtatccggcgggcgttactttcggcaactttggtgatggtaaggctggggttaagctgaaccggacgaccactaccagcccaggcatcttctccaacaacaacaagccgctgccgcttaatggtcagcgcaaatatcgtgttgtggttaaagccaagggcgtgtccggggcgatgaacatgttgatccggcgccagaataaaatcggccagaccgacagcaattatgaagataaaaacgtcacactaaccagtgagtggcagaccattacctgggagactggacttactgcctctaacgctgatggccagaactttaagctttacgcgcacccggctaatgccgaaatctgggttgatacctttaaggtctttgatatcacggatgaggtgaagatcaaggctaatagcgatgcgctgtctacgttgtcgagcacggtgacgcagcagggtgacaagatcaccagtcagggcaacagcatcactaagttgaccaatgacctcgaagccgctgacgcaaacatcgcgaaaaaggccgaacagtcggcagtcactacgctgacaggtcgggtagagaagacggagtccggtctgacggcggcgaacagcaacattacgtcgctcaacagctctctgaaccagcaatccaaacgcggcgctaatctgcttcctgatggcacttttgaaagctacgcggttggccacaatctatcaaataatcgcgttatcgtgaccactgatgactcgcatggcggtaataagtgcatccgtgtgacgcgtccgaatgattacaacgctaacgcaactgataacagcgataatcacattttcagcggtttccaggtacgcgataacgcagtcttctatatggaatgctgggttaagcgggatgccaagagtaccgctatggccgagaatgcacagatctccattggcttatcgctccagtatcaggacaactcctggcagtggccggcagttaccaaagcggcaaaggatctctcttcaactcaatggacgaaggtttctggttacctgaaatcaacgaagagcggtattaagcaggcaatggtcaggatttctattcctaacgttagcagcgttaaggcgggtaactcattcctcattgatgacctggtcattaccgaagtgactgatgcctacaatgcgcaaagtacagcagacgctaatgccaatgcgatttcgacactggactcgaccgtctcccaacagggtgaccagattaccagtcagggtaacagcatcaccaaactgacaaatgacctggcaacgaccaataacaacgtcagtaaaaaagctgatcagagcgctttaagcgtgttgtccgggcgcgtcgatcaaacagaatcgggcttatcctctgcgaatagcagtatcactgcgcttaattcatctgtacgcgcagggaatgcgacaagtggcgatttgattagcaacccgacatttgacccagagtttagtcagatgggcttcactgtggtttccagctcgtctgagggcgtgccagccaattgcccatacgcttatgttgcacgcattgcggctcgcgaccatcacccaaattttgctgctattccggcgacattgggggatgtctatgaaatgtctgctctcgtcgcgtgtggcactggctccgctgatttcaacctgtatctcggaaccgcaacacggccaagcggcagcgtgggcgcgcctctgtcatctggcggcaaccgcaaggcgtcggccacatggcagcgagtaacctggcgtttcaaaattactcaggggattgtcgatcgcggcttcttccgtccattcctgcaaatcaaccagtccagcccgttcggcaccgtctggtatgtgaccgactggcatctgcggaacgtaaccgactcctccaaagttcaggattctctcgatgctacggcgaaagcggttgattcgctgacctctacggtaaatcagcagggggagaacatctccagcattggtacacgtactaccaatcttgagaataatttgagaacaacaaatgcaaacgttgctcaaaaagcggacgccaatgctctgacggcactgaccaaccgtgttacccagaccgaaaaagacattaactcaacgagttcttctgtcacgaatctgaacaataaggttgatgcgatttctgtcggcggtacaaacctgatcaagaactccggcgatatgaccggctggtcgaacgttgtcagcgatacgtatcgtggtaatgcggtaattggcgcaactgtaaaagccggctccggttacaaggatctgcgggaaatcacgcttgagtcgccggtcgatgcaggtgagtacgtttacagcttctatgcgaaaggcggcgttactggccagacgatgacggcgttcttctacaatccgaacaccacaacgtctatcgagaccaaccagggtgcgaaaggtagcaacagtgatggccgtgcgcagttcacgctgaccacttcatgggcccgctattgggttaagtggaaacagacacctaccacgggcaccaagcgcctgattctgtgccgtatcgagagcaatacctccaaagaccagacggtgtacatcaacagtccgaagtttgaggtaggtaacgttgtttccgactggaacgagtctccgtctgatagcgccagtgcgtcggctgtggattcgctgacaacgaaagtgaatcagcaaggcacttccattagctctatcggaaatcgcaccacatcgctggaaaacgggctatcgacagctcaaaacaacattgccaagaaggctgatgcttctgcattgcaggatctccggaacacggtgacatctcagggtgacgatttaaccgcggcgaacagcagcattaccagcctgcaggcctcgatgaaccgtcgcactgtgtttactgtcactgcacggggtaatggcaacagcgttacccatggggtgtttgatgaaagcggcaagaatctgtttacccctggtcgcagctgggcgctggtcacttttgcaaaacacagcgacggatcaacggtgattgcgacctccaaaacatacgatgtttttggcagtgcgaataatggtgccacgatgtcggctgatatcgaggcgttggccagtggcacttacgtttgcgtcctgacattcgatgagccatctggcaaccgaggtaagatattgtctgctctggaatctcttggtggtacatccgaagtcgtcaactccttgccgtatcgtggtgcctacattctccttggccgcaaaggcatgaagcctggcgatggtctggaactgcgtgcgccaaccggtggcgacggcaccgcccacatttcgacctcagtcgagtttgtgaacggggtaatgatgggactgggcgccgccggcggtgtgatgatgaaggctgatgcgaacgcatctgcaattacaacgctccagaacacagtgaagaaccagggagataatattgactccctgagctcctcgacaacggcgctggaaaacagccttgcgtccagtaacgccagcgtggatgcagcaagccagatccccgggaacctgattgtaaacccgtcttttgagcgtggtacggagggctatacaggctggagcgggattgccacggtggtaacgctgcaggttccacatcttggcaccaaagccgccaaactggcggcgggtggttctgcaggcgtgggccagaagatctccttcaaaaaggatcggtcgtacaaaattggtatctgggcaaagcaggaccctaataccaccattcagtcgactgacaacacaaaattccgtgtggcagaaggtaacggtctaatcgcaagtaaggcttatggcccgtttacttcgaactggcaggaagtgtcctggacctggaaggcgacaaaggatgtcgttgctgacgttcagttcactgctttcttgtccgcaggcgcgatgtactttgatgatttttatgtcgtcgatgtgaccgactctgttgaaactcaggcgaactcgagcgcgatcactaaactcgatagtcgtgtgaccaagacagagaatgacatcaccagtcagggcagccaggttacgcaacttaagaatgaccttgctaccacaaacacaaatgtttcgaagaaagctgatgcggctgcgttaacggcattaacgaaccgcgtcacgcagaacgagaaagaaattgaaacccagagcagccagacaacttcgctcaaaaactctttgagcactgttcaggcgatggggagcaacccgtggtttgatggttctctggagacgtactccgaaaaccagcagatcagcggctcgcgtgcggtcgtcgtcagctctcagaaacgaagcggaacgaagtcgttgcgtgtttcccgcggcgccggtgagggcggaaacagcgataaaaccatcggtaagtggattgctctacgtgaaaatgcggtattccgcattgaactctgggcgatgatgccggcagatcagtcgccatcctctgggtggtcaacgatcgttggtttgcagacccaaaacgctgccaacaacaataactggccgtcggcgatcaccatcactgaaggttcgttggggggcagagggacctggaagaaattcaccggcacgctccgtgtagcgactggtcacactcgcggcgtgttctggatttctacccgcggatcaactggcgccggtacgccggggtatgatctgtatatcgatgatgtagttgtcaccgatatcacggacgcaaaagaggcacaggattcggctaatgcgaacgcatccgctctcaccagccttacctcacgtgttaccaatgtggaagggcaggtaacatcccaagcgtctcagctgtcctctttgacgtcccaggtgaatgatgcgtcttcgaaggttgatcagatggcacagaccattaccaacaacgagaaaacgcagtcgtcgctgaacaccagtttgcaatcgcaaattgacgcgcaggcatcggcaaacatcaaaaaccagacggagttgaataacgccaccacctctctggcggcaattaagtcaactcagcagacccaggccacaacgataagcgcactgtctcagcagcagacgaatttgacagctcaggtaggaggccagtcagccgagcttcaggagctgaagaaaacggttgttgaaaacggcaacgttaacagcacctggatggtcaaaatggaaaccaacagcaacggtaaaaagtatgctgctggtatagctttaggtatcgatggcaaaaatttgcagagccagtttctggttcaggctgatcgcttcggcttaatcaatacctctaacggaaacacgaccacaccatttgttgtggaaaatggcgttgcctacataaatgccgctgtgattaaggatggctccatcaccaatgcaaaaattggcggtgaaatccgatctgacaatttcgttaacggttcaaatggctggagaattggaaaagacggtagttcacagttcaacaacgtagttattcgtggtgaagttcacgcaaatactggtgtgcttaataacgtgactattaacgagaactgcactgtgcttggcactgttcaggccaataaaattgttggtgacgttgtgacaatgaccgaccgtgttgttaaaaactggccagcttccgggaatacctcatccggcacgcgctacctgattgcaacgattgacggtatgccctttgaacggcgtatggtgttcaatggttccgttgcgattgttcaggtatggcgtcagaacgtaacaattcgcgttgatgaaacgaccgtttggacttttgactctggaaacgatggtaaggactttgaaacatcaatcttctcaatccgtatcccggcgtcaaacttcggtcaacgtcaccagattaccattcagtggccgaaccgtggcgatagcggtcagttccggtttacaggggttgtctcgatgtacagaactactggctccatctctctggcttaagtttcaggcggctctttgagagccgctcattaaaattacaaggaatgtaattatggcaatgtatgaagttggcaccgtaacgggtgcagcaaaccaggcaaaggttactggtatttcaacaaagtggtcggagcccgcacttggtattcaagagggttcaattttagtcatttatcgcaatggaagtgctgatctgtatgccatcaaatcagtaaataatgacactcaactgactttgacgagaaacatcacaacagctttttctggcgcgaaatatggaattatcacatcagaaacagcgagcacttcatcatttgcaaatcaactagccagcgcatttaccctttggcgtaacgttgttcaaggatggtctacagcactaacaggtagtggcaatattacgatgacagaccctataacaggtacgcaggtgaccgtaccggcgattgccgggatggcaaaggcctcggatctggatgcgctggctaaactttcaggggaaacaacctcgccggctcgcaaattataaccagcgatagttccggttttattttgggcaggaacaacgatattggactggtcaaaaaatcaggcacctacggaaagctgatggtaggcagcggaacgcgcttcagcgtggtgaaggggaataagtcgactattagccctgaagatacccagacggagattatgggggtcgatagtgccggcaatatgactgttccgggcaacatcagtgcggggaaatattttgcgcaggcaattgagctttcgatgagcactccgtacatcgattttcatcataacaacagtaccaacgactacactgctcgtttcataaccacagccgctgatcaactgagtgtgcaggggagccatctacgggtagacagagacctgcgggtagggcaagcggccgacatcggcagctggatacagtgtcgctatgactgtgtgtcccagcagaccgacttcggttcccctgccattggcgcgttagtttccggtggcagagtccggtcccgcatgacagggcgtggcggaaacggcgacacgtctggagcgtggggtggtttctacctggaagaatacgttgggtacaaccaccgggtggtactgtatatggacggttttgacagaaaagatgcctggctcttttacaccggtgggacaatctccacacctaaaggcgatgttatgaccactggctcagacgtgcggctgaaaaaagattttacggattctcagaaaggggcatccaagcgtattaacgcgctgggggtatgtgagttcaacatgaaaggcgaaacacgccgtaggcgtggatttattgctcaacaagctgaaaaagtggacccgatttacactttccaaagcggtgatgtagaaattgatggcgagaagatcaatatccttaacgtagatcagacagcaattgtcgcagacctggtaactaccgttcaggagcaatgcaactgtatcgaaaaacttaaagaagagctcaaaaatctaaaggatctagtgatgcaaacgccagaaacagcagcataaaagcaatcgatattgtatgtaagtacttacctacaattaatttctaatttatgatataaatctgccatccgatttgacttattcatggaggaagacatgtcaaacgagatggcaggcgtgacgccagagcaggtggagcgcattgccgcaattgtggcgcgagaagtcgtaggaaaattaagtaaggagcttcgcgatgatattggccaggaggtcaacgatcagctgcgaacctactttggtgatatgactccggcgcaacatagcattcagcattccaacctggacaaacttcttaatcggctcgacacgatttcaagcgggttctttgggggcattatttccaagattacctcgttcctgatcaccgtgctgcttttgggtttggccgcttatggagtgaaaaatggactgcaataacaggagaacaaggatgagtactccaagaggcattcgtaacaataaccctggtaacctggataaggggtcgccgtggcaagggctagtaaacaatccggcggaaccgcggttctgcacttttaaagaccccgtatgggggattcgagcactgacagtaacgctcatcacctaccatgataagcgccgcgcaaaagacggttccagcatcgatacgatccgcgaagtcatcgagcgttgggcgccgccgcatgaaaacaacacggccgcatatatcaatgaggtctctaaagccgtaggcgtgacgccggacatgatcatcgatctgcatgactacaatactatgcggccgctggtggaggcgatcattcgtcatgagaacggtcgtggccctttgaaaacactcaacagctggtattcggcagaagttattgacgaaggtatgcgtcgcgccggcgtcgttaaaccggtaactgcagtgaaagcagtacccgtcacgaaagaaacagccggcgcaacggtgactgcaggtatcggtattgcgcagctgacggacgtaatgccgcagatctccgttgcgatggataaggcccagggacatatcaccagcggggataccgttcgcattatcttcggtattgcgaccattgttgtcgccggctttattgcctggtcgcaagttcgtaagcatcaggcaggagtggtgtaaccatgaacggcagcctgctttcaaaggtcaaatcgaccatcatgactttggctgccgtcttctttgtgctcgttggggcgtacacctggggtggacgcgctgcccggcgggccatggaagaaaaggcgcagagagaaaccaacaaacggcttcaaggcacagtggatgtgaaaaatgagacgattaatgaactcaggactaaggatgcttctgccgttcatcgcgagcttcgcgataagtggatgcgtgattagacctcagaccgtgggcgtacaattctgtgatggggcaaaccctatctacatcagcaaggacgacgccctgacagaagaaactgagagggaaatcctgatccacaacacgctgggtgagcggctgtgtcgttgggggtacgcgaagtagcacatacgccgcgcggacataattagcgcggccttagtcatgaactacaagatgtcagattttcacgttacttatctttaacccggctttctcctgtaactcagtaagtgctaagacattggcagggtggcgaaaaaaattgtatgcattcacggccacagactcgtttaaaaaaccatggcttagcagagagtccacgctggcatcgtatagcgcctcaagagaattgaatttctctgccagcaaccaagcttcttcctcttcaacaccgtagataccgcaggcgaaaagaagcgggcctaagcgaacgttttttgctcgttctataccctcataaattttcctagcctgcttcaaaccacctctgtcgataccaatcagcgctccataacctataaagaacatgtttagtggcttttgtattagccttttctctacgagctgcttgagagttttttcccctaattggtctatatgtactcctcgaggctcgaagaagcgccagcaagcagagtatgggtttcctgagttcagaaggccgtaagtgttttgggtactgcttagctcaatgctcatagtgagtactcgacgaaatgctagacgctaatcgtggtctatgttcgcacgatcaaggggttggcatattaaagcactcaccacatccgaaactacggtattggtcaaagaaactcgtgaccgtcgccaaatgcctttcatttcacctttacaccgcagccgtaggcatttaggctatatcgcatataagaaaacaagttgtttcatacgacgataaatcacacgtagggatatcacgaatgactcagatcattgtggtgggcggcaccaagggtggcccaggcaaatcgactgttgctcagcaaattgcagcctgtctgaaaatcaaaaagaaaaagaaagtccagatcactgatatcgacatccagcgcaccacgacagggtggtgtgaagaccgccggcacaatgaagaactggagctgatcccgttcgcctatgtccaggatgacatcatcaaacacatcacttcgcttcgcggccgtttcgattacgtcgtcgttgacgctggtggtttcgactccgaaattcagcgccaggctatgctgatggccaacgtgatccttatcccgcttcgcccgaaacgccgcgatctgaaatccttgcgtgacatcgaccccatcgtcgacagcgttagcagcgtgaatgaccaaatcaaaatccgtgctgtaatgaaccagtgcccgtctctgccctcccaggctgcgcgcattatcgctgcaaaagaaattgtcgaaacctttggtatcgaggcggtgccggtgaacctttacaaccgcaacgtctatgacgatgccgaagaggcgggtcgttccatctttgagatgaccggagccgaacgcgacaaaaaggctgaggccgagattgaagcattagtagaatacgtaatgaccttggagggtgaataatgtccatgaaaatgggtgatctggcaaaacgtccggctgcggaagctgctgcacctaaaagcagcaccccgatgcgccagcctgtccgtccacaaggccgtccaacacgtggcaaagagaaaatcaaaagccgcacgatgtctcttgaagacgagtatttcgaattactggagatgatgaagttcatccctcgcttcgagaagttcacccgttctgatgtgatacgtgcagccattttccatctggcagagaagtcaccgcaggaaattgaggacatcgtaaagatgaacgaagcgatcaccgctgctgatgtgacgatgcgtactgacgaaataaagcgcgagttgatgaagaaaggctgatataaatttctaaggctgtctatgcaggccagccttagaaatacaacgttctatgacagttattcgtagttaagttcaccgaacaggctgaacatcaagtcaccatccagaatttcaaatggcagctcaacatactcatccttatgcctcggaatcgctttgccgtcgtttggggcgttcttggtgtagccttttacatgctcaccgttttcctttgtatacggtagaacgactattcgaccgtgattttttgaaatgatagtaccttctttccagagcgtattgcctcttgaggtaatttcgctgtcatttgcttctttaacactccaacctatctgatttatgtcttcgaaccagaaaacaaagctgccaacgacgattatttttcgtccattccggagagcctcatccagcattctttttacgctggcgagttgtagtagctggttggcacgtggcagaagcattgagcgaatagtcgcttttgttttgccccaatgtgcagtgcctgataaaccaaaccctcttgcgatacgttcctggtagcaaattttggatgattttgctctggggctatgcacttgctcccaggtgttaggttctgttagtctgaaacatgtctggaaggtgggtaggaaaatccaatgcaagtaaggcatctcgtgtagtatgtctagcagatagggacgtacgattaacccttcaggtttgataattagctcatctgatgacaaacgtcgatcgttcgtgtgtcttctaatggcctcatttagcatcatatgctcctcatccatcagtcgcgattttgagatgagcgccttatcaatttttaagcgtagtgattctctttgctgctgagttaaagatagatcatctatattgaaagctatgtttttatttagttcttccgccgcttttcttgcatcaagatagctatcgtagacgtcatcaaaggcgaggtttggcatacctcgatcaacatatcgcctataccaagccagagttccatcatcacgaagtttcagacagaacatagaccaattatttcgttcgtatttaggctgaggccagaaagccagctcgggaagaccatatccgggaagtttgttcatgcgcatattgataatactcacgaggataaagcgctgattttaacatggtcagccttggttaatcagtcagttctgtcagtaacatagcatctgggaattaaatcaaattatgtgattctgggcatctgttttgtagcctgcttttgtatataaatactaagctacatattatttatatggagacaggctttttataccaaattcccagacacattcccttccgtttccacttccaaaaacagtaactagtcgctatgatcagccaaatgttaagtaagtagttacctatcggtgggggcatgagccagatcttttttgataccataaacaacggccagtacgacttcatgacagagtgggacacggtcgctatggacaagtgggttgcggaaaacatcggtctttcacgatgccagggagaggctgagctctttgatacaaagtggtttgactatcgcgacatgcacccgctgatggcaacctgtctgttcaccgaagcctataagcgcgcatactcacagatcatgctgtctcatggccgcgagcatttcgagacggcgccattcagtactggtctgaaacgcctgccttaccaagagctttcggcggtgaacaaaacctctctctggaaagctcgccagtttgcagatcggtattgctgttcttatgactattttatatcaactgttctatctgcagctgcacgccggctctgggacaaattacctcgccctcagcatctttggcagccagaactgattgagatcttcgaaagcaaactcgccaatcgtgcgggaacgcgtctggatgactctgtcgtgagttttaagcacttgggagacatgcagcatgacccaattcaggaacgttactttgaatgggttctggagcgtttgaagcacatcacccgtgataagcgtatccgcaccatcttctctgctgtctggttgatggagctggtgcctgagcgcgttatatatgcccattacccggaagaactggaagaagcacggcgactgtgttgattgcctgctccatatttttacgattagaaaacaacttgtttaagcaccaaaggataacaaacacatgaccgaactttgccacacgggacgagggttgtctgaagagttcgacgacgacttccagaatcgtctggcggcgtatttttgccgcgatcatgagtttctgactcgtgccggcgatctggttgcccccaaccaattctccaatgcggcgaacgccatactggtgaacatggtatcgggctatttcagaatgtataagagcgcgccttcatcggcggccatcctcgatatgttgaagcgtgctaaacgcgataagacgatcagagaagagatgttcccggatgttgtggcggcgtttaagcgagtgctctcggaaaaactctctgatacggcttacatggtcgaccaggtcgcgacgttcgctaaaagtgtagcgttcgacgatgcgttgattaaagcggccgagatgaaggagaagggcgacttccagggagcgatggccatcatggccaaagtgcagcagatcggttctaacgaagcgacgggcatttatgactattacgcctctgcagcggaacgttacaaggcccgtgaatatgaagcctctgatgattacgtgccgaacagcatcaccaccggtcttccgctgctggatcgtatgctctatcaaaaaggttgggcgaaacgtgagatggtgctcttcatggggtttgcgaaatcaggtaaatcgacagcgatggggagttctccattaacgcaacgctggccggctacaacgttttgtatctttctctcgaagtgcatacctcgattctctccgatcgcttcgatgcacggctgtctgaaacggagatgtcaaagctggtggagcagcgtgacgacgttcaccggaagctcgcggagcttggtgcgacgaaaggggtggggaatctgtgggtggtcgagcgcccgtcaggaagcatgtcgcctgcagatttggatcgtatgctcaatagcatgaaagcgaatggcatgatcccggatatggtggtggtcgactatgcggatttgatgcgtgccagttacgacctccgtgacgaccgggcgaacatccgttctatctacaccgatctgcgtgctctctacgataagcacaacgttgcaggaatcacggcatcccagaccaatcgtgaaggtggctcatccgaagtggccaccatgatgcacgccgcggacaatatcgaaaaagtccgtatcgccgacttagtcatcactatcaacaagactgaagaggaagaagccaaaggcgaagcacgtctctattttgctggttctcgtaaccagaagggcggggtgagtattcgcgttaagcagaacctcgaacagatgcgcttcatcgagcggatcatggaggttctttaaaaaaataggcgtggggcaaagacggataacagccccacgcccttaaaaattaccttttggttaatcacaaaaggaaaaacacatgagcctttatggtattcaaaaaacgcggcttatcaagatattgccgtttaaaaactgcggtaaatgacaatgagtgacctcaaagagttactgtccgagctggatttcgaacaatggctggatatggaaggcatcatctatcgtcgcggcggtgtaagcgcccgcggccgcgaagtgaatatcaaagaatgtccggtatgtggaagcacaaactggaaggtctatttcaacctgaccaacaacgtcgggaaatgcttcgccggcgatcacccagaagaaattcaatttaacaagctggttttcctcaaacactacagcggtaagtctcgtcgtgccttcgaggaatacgtacataacgcactcctgtctcaaggttgggcgccaaaaaaagaagaggttgtgctggccagtgctgtggaacttgaaggcccgatggctttaccgcggcattatgagcttccaattgacggtcggctgccggactatcttgttgagcggaacattaccccggagctggccaaatactttgacctgcgttactgcgtcgagggaaaacatgcttatgtcgacccatataccgatcaggttaaagggcaggcattcgatatgcgcatcctgataccgatttacgatctgaatggggtgatgaagacattccaggggcgtgacatcaccggcgcagcagaacgccgatatctctttccaatgcagctgccggcatccgggaggtttctctataacggacataacgcagttggaaagcaaacagtcgtcgtctgtgagggggctttcgatgtcatgggggttaagcgcgccatattcgacgaagagacgctccgggactacgtagagcccattggcacgttcgggatgcatctgtccggaaacacgactgtagacgcagaagaccagctgggcgcgtttctgtcgttaaaggcagatggtttgcgaaacgtcatcatgatgtgggatagcgagaagcaagcgatccgaaacacaatggcggccgccagacgattaaccagtatagggttaaatgtgaaaatagcctgtcttggagaagaagggctagatcccggggaggccacccaggaacaaattctcaaagcctactatcgtgcaaaaccctactctaagcagctggagctgcagagcaaggttctcggtattagtgcatttaaatagttcgactcatggctgtagttccatatccgtgtcggaaataccataatttgtttatgtatgtaggtatctacttaaatattttaatgtaataaataacactttggttatggaggacatcacatgaaaaaaggtatcgaacaggcagttttagagatgatcaagaagtcaggcgtagagcttggcgtgggcgagctggagagcatcatcgatgcctcattcaacacggcatcagagcatatatcgaatgcgctatcctgcattcctctcaaagaaggggcgacacatacctcggtgttagtgtggtacgcaaagacgcctgaaatgcctggtactgttcaaaagcgcgtagctctggttgcgttcatcgtcccgtcgcttgagaccggcattgggccagtcgcgcattttggcgcttggtatgacgacaaaatcatcttctcaaactgctaccagatggaaagcagggaaatgcttgagcatagcgtggacgtgactctcatagccgtagaaagcaaatgcgagacagtaggagaggctttcgttagcgtcatgacttctcccgatgttgaaaagcgccatgtagatctggtggcaccaccaggcttgttggaaatgattgtctctggagattacaccaaggctatagcgcgtgttcgtgagctggactatgggcgtatctgcgacctgtgtcgtagtgatctggacttaatcaacgtgatcgttgaggctggccgcgtctgtgatggggtgttggcacaatacgcaagtaagatcagtcgtttggccaatgaaatgcctatgctgattcaggaagccaaatcccacgccgttcatgccgcaaacgacctgctaaccccttatcgatacgaagccgcaagtgacaagatgaccggctgggccacctggtaagccgtgactatgtactgtgtccccgtacagagttatttaaactgattagtaagtaagtacaagattatcgtttagagaaatggctaccaaaactgacttatcaaaaatcccttcgatctctggactcaacggctactcgctgcgttgcccggaagtgaagcttaacggacatgactcgtactgcagctacaccgtctgtcagcacacgatccttgccttcaaagagaagcgactgccggcgtcatcgttcacctcctgtgcgaacgccatttcggccggaaaatgccaggcgctgaaaatgatggtagaggaaatccggcaaggtgagtcgctgtatttcgtcgatatgccggcgctcattgaagaggtggaggaacgaaaccgaacagcgagaaccctgcagccgaagagaggcagtgcatctatctacagtggaattaaagggaagcgccaatcttcgaccgtggctaaaactggcagactgccggatgccagcgagatttattcagaacttatcaaagaaaccttaaaggagaagaccgactaatggagaagctgatcgcgcttaaacataagctggacgccattaaaacaatgggaacgaacgccaagaaagaggcgctggccagtatggatgacttcgaacaaagaatggtgtcactcatgctgaacccgtttgttcgtttcggggtgaagaaatacaacgtggccgatccacttagcaagtccgtacccagtgatcagaaagcgatagagctgctggagcaactgattgaagcaggagaatactcatgattccatacatcatattgactttttctggaggcgtcgcccttggcttcatcatctgtcatgacttgatcaagcaggaactgaagaccaaaacacttcgtattggtaagcgggtatatcgcgtcgttcacgagacaggggtatcaaaatgagcaatctaacctcgtttgactggtggataggcttgtactttgtggcttctggtgtcgcagtagcttttacgattggccagtccctggtaaagctactgcttttaagattcgccaatcgcaagcgtatcgatgacacgctttggtgccttggaactctacttgaacagcgttacggcgagctgaaggaaggtgcaaccctttgcataaaggcaaaacgtttcacggccacaattcagcggacgcaggatgataagtcaaagctgatcaaaaaatgagcaaaagaatgcatgaaataataggtaattatttacttattattttgatacaaatatgattgacttgttttcgttgagacgcgactgtttgaacgtttaaagataactgcaaacgacaatcagtatctggcagtagcctaaaaagccaaacaccagcgaggtcagtttccagcctcgtcaccgaaatgggacacactaagcgagtgtgattgcaaaacgcaggtagggcatctggttaaccagtgcccttaccgatgaggtaacagaatgggcggttgggttttatgtccaacacatcccggctcccaaagacccgaccgtctatcctgttacgtcatttctgttacttatgtcgtttagttttgggttaaaaatggcgacgtaacccggctggttaggtgagccagcacgcaacgttgagaccactggtttttgcatcacagaggcagaaccggcagacatgtagggccaagtacattaatccgttcagtggtttcaacgttgtggtcacggtttcattatccttctggttatagccattgttgtcactgccccgtggccacaacgattaaatgattccatacatctaattagatctgaatgaaaactctcctcaaccctcggagagtatttgaagatcttggcttgtaagcgtttggtgaacacgtaaagcacaagtggcaggaaacggtaggactgctgcgaacgacaccggtgaatcggtgatacagccccacaagtccgtgaatcgacagaggctgacggtgtcaaccttagatggtgtagctcagtggtagagcggttgactgttaatcaactggtcggtggttcgaatccacccaccatcgccaacacagcgctgaacggtttggagttcgccaccaccatccgaacggaaagactccgcaaatgtcgccagaccgttcagcgctgtgatagacacggcagacgttcttaaccattgcttcttagcatcgtagcaacacttttttcagcgcaaataattaaaggggcttcggccccttttgtaagattagcaaaaaagaacaatattacttgaaaaaaaagacaaagttagtcaatttcatttaataacaccaatgtcataatcgaggaccttgctcctctgcttaattaaaccattacctgttaagtttaatttgaatagccaattctatcttttctctgaatttttttgcatttccctgtaagtaagggtccattcgtttgaatatcgatagaagcttcctacgatatgttaaacttgtagagttaaattcccccgttgttgtgtgtattaataatgcctcacctatatcattaatctgcctttcttcgagcctggtgtaacaggtgacaaccatctgtaatatggatacttttgagtaccccttcaatttcgggctaggaataacatgctctaacatagagcctaatactttcgtcgcttccttagggatatacctactatcctccttagaattattaactgtttttatatatgaactttgttctgcccaatctatagcaataccgaataggcgacatagaagatagtgatatggtgtttgatgttctgcgattgagtcaatactctgaactttcatttgatataatattttttcagcaaagtgtttgaaataatgcagccaaagatgatcttgcaatctttgatgaataccttgatgcaccataatttcgaacattgttattccagaattaataggacaactaaatctactttgctcacggtaagagccaaggggcttgtttagtatttctgataacttactgtcttcatctaaacgccagcaaacagattcacctatagctctatatatgccacttttacttgcatacactgagtcggcaaagaaaaagtgaagcaagcggttggtttcaggtatcgcaagacgtcctccagtacatgtattttggttatttttaagttctacataaagacgactaccaggtgagtcaagcagcgaattaataaatctatcaatgaaatcagaacgaacgacctcatcagcaccaataagcctcaaacaaaaatgaggatatgcaagtgaaagatgccttgtaagatcaggagaagttagtatattcagcaaaacctctcgggctttatcactggcttcataatttgatgatagcttttcacgcaaaggacttagtagggaatatagacctttcaccaagacatttcggtctttgggttcttctccattcaataacgcatttcgatcggagccgccatatagcttatcaatccattgaacaataaggttcggttttccattagcaagggatattatttcgtctaactgaggctcaactaacaatactaactcatcatattttttggtaagatgtaaactctcaattagctcaagaaatagttttattttacctcgatttaatgttggcgattttagccgaatgaaaagatatgaggcagccaagagaaacaatagatatactgcactcgaactatccaatccccatatccacggtccgaaactgtaatacagtccaacttgtcttaatgcaggtgcaaaaaccaaataattagctagtataaaaatcagcccaatgattagtaggtcccaccgagtcatacaaaaacgaaatcgcagtctgctggtaggagtaattattgcccatacggcagcgatcactccaagtatagtgagtaaattagtggtatctattttggctggtatcgtcataatattttcagtattcctttagtagacgcactggcaagcttaaactgtatcacatgaccgcttcatagtagtcatgattgaagcaaagcgcctatcctataataactaaaaaaactttattatccccctttaataccgtaaaaaactttgttgaagtcattatgataggtaggtacatacttatcttttttgtgtttctaatgtatagtactttcagttactcacttgaaaggactcaatatgggaaacaaacgtaaacagacgcgtcgcgcagctcgtcaggctctgaagtcaaaaccacgtatccacggctacgaaattgacacaatcattgttgacgaactggctgccgcccctgctctgcctccgaaaccgaagcgcgacaactctcctctcgaagcgcgaaacgaggcccaggcccactatctcatctccctcgataccaaaacgctaacgttcgccacaggcgaagctggctgcggcaaaacgtacctggccgcggccgttgcagcgcagcgtctacttaataaggaagtagacaagatcatcgtgactcgtccggtattgcaagcagacgaagatctgggcttccttccgggcgacatgagcgagaagttcgctccgttcttccggccagtctatgacgtgctacagaagcgtctgggtggctcgtttctcgaatactgcttaaagccagaggtggccaaagtagagattgccccattcgcttacatgcgtgggcgcacgttcgagaacgctgtagtcattctcgatgaggcgcaaaacgttacagcgtcacaaatgaaaatgttcctgacccgtatgggcgagaacgtaaccgtcattgtgaacggagatgtgacgcaatgcgacctgccaagcaatgttaagtctggtctggaagatgcactggagcgatttaaaccttcctcccatgttggccttattgagtttgcgaccgaagattgcgtgcgttctgagctatgcaaagtcgcactggaagcctatcagtaagggaaagccaatgaccaaagagtacctgccacaccagaaacgtgtcatggatgaacacgaagaactgtgtggccgcatcaaagaactggaggcgtacattgcaggcgacgagtttgctcgcctgctgtatgtcgaccgcatcatcctcatttagcagctggacacgatgaaggcgtatgacctgattcttcgtgcccggatcgctcgtttttaacgtaaggaaaccaaaatgaccgatatggatatcgaaaaagagattgtggccaaaggcaaaacggccgcgcgtgttaccccggaacgcattgaagctgttatctcaggcgagttttactttaccggcgcggacggatatcgcagctcaccgttgtggctgaagcaggaagagcctgaaccggccctgcaatcactcgaactgctgaccttctgcgttcttgtgctggagaacggctacaccgtaaccggcgagtctgcgtgcgccagcccggagaactttgatccggagatcgggcgtaaaattgcacgccagaacgcgattgccaaaatctggccactggaaggctatcttctcaagcagcagctgcacgaggtgaaatgatgaaggtcgttatctacggacgtgataattgctcatactgcaaacgtgcggtcgagctggcgaagcagctgaacggccacggctttggtgattacgaatacatcgatattgtgtctgctgggatcgacaaagagaagttaagcgacctggtgggcaagccggtggaaaccataccgcaggtgttcgtaaatggtgaacctatcggcggctatacagaatttgctgcttttgcgagcgctctgtaatacaatacggctccttttggggccgtttattatttgtcgctttcatcaacacagcgtacacttaggtacgagccatttagctgtaaagaggttttatgcatttagaaaattgcctggaagatatgaatgtcattagcaatgctcttgctaccgtgacttctaacgcttcacgcttttcgaatgcaaatagcactccgaaagcattcccgaagcgtgtacacacaaaatttaagatgcgtccccgtttcggcggcatcacaaggtcgacgaggcccggttttgcagattcccatgagttcagactgccgcaaacggaaggcattccggttgctgagagtgacaccgcagctcaacttgcggatattgaacaaaggctcgcagagctgacggcgaaacacgttaagttgacccatagcatttcaggttacagtgcggaacaaatccgcgaatctttcggtgaaggccgttacgaggacttgaagaacgttgacctgtccatacgtggtttagagggctttgttaacaagttcgtccgtgatgcagaacagccgcatccgtacctgaaacgcttgagtgatgctatcactgagtaccgtctggcagtttctgacctcctgatgattttaaatcagtgctttaacgaggtagaggttatcgaatcgcagacaggcctcattgatgaggacgtcttcgcaaacttctccttacattaaggctgaacgatgaaagtcacatggaacagtgatagttacgcccaatttttggagccggtcttcagagtaatgccagatctgaagacctccttacttgctgactttgtgagttttaagaacggcttttatccggccgtttttggcaaagatggcccctataccgaacctggttctgtagtttcctctcgtgtttaccacgttcatctcttattcaccaagcaagaacgaaatagtcaccgaaacaggttcaactgcacaagcgaccgcgccctcgtttatacccagcacgccaagtttcaggacgtgtatagtctgctggccatcttcccgaaagaggcgcacaaaacagccagtgatccagtcaaaatgagcgacatcgccaaatacgcggcagccttccagaaattaacaaacccgtagttacctgcagctccatgcctttctcattcgtagcgtggttctattgcgataattttcatattttttaggcaattaatctagtctttgcgcgtatgcataaatatacgagaaataacggtacagaaagcggcaggcaaaataaccacaaaataatgaacatgccatacacaccgctattcacgccaatgtgacgatcccaaaagggtttggtcattatcttaagggctagtttctccgaagtataatatgagaatgggtacaggacggcgcttaaaacaagatatgtaaccacaaatggcatataaggaacataggcaggaaaaatgagtccgtcattcatatcgcgcactataaaatagatcagatagccataaccacaccatccccataagcagtgccgtaaataatattttaaggtcatcatctatgattccttcatagctataccattaaagctatcataacatgaattgacgaagtcccccttcgagaccaagcggcatcgagacagccatagacgcaaacatgactaaactggcaccggacaacgatgggacataacgcaaagactagggtgatgtcgcaaacaaacaggcgggaaatggcacggccctgatgactaattttcaaaaaaaggcctttctatgattccatactttgtaggtatggaatcattagacaaaagagggtattttaggttgatctcaataaaaacaatgcctaatatactgtatataaaaacagtataaaaagcgtcatacagtggccagattatgaaaaacacgtttgacagagcacgcgcagcggaaaacacgtcacaggaagcgatcacctatctggatcgggcaacgcagatggatgccaggtcggtctcgatgcagggtgccgatctgactttcgccgacgcattcatgttattcactcgcttatcattattgataactcgccgccggccagagatagctgtccattgtgttttgatacatgttctcccgcatatcgctcaggaaaaagtaagtaacctgaatagaataatggtgaatcagctggtcaacccgctgatccttgaagggaagatcgtgatgggtcgccgtgttttttccatcatgaagcagttcctgggatggtgtgccttccaggggattatcgaaacatcgcccctgaatgatatgtcactgaacaaagttgccggcggcgcgaagacggccccgcgggaacgatgcctgacggacgcagaggtttgggtattctggaatgtctgggactatttcgacgtatgtccgggcacgaaatgggcggcaaggctttgcctcgtagctgccagacgtccagatgaagtgctgcgggccagagtaagcgagttcgaccttaagctaaatgtatggaatcaaggatctcgcaacaaatcggcccggtcgcacacccttccgatgagctcactgatgcggaagtgcgtagaagaattgattgattatggcgccggcagccagtggctcgtcccgtcgaacaaaaaaaaagctgatacgccaatgtcgaaggtggcaatagcccaagcgttgaggcggattctggagcggccggagctgggggaagtggagtcgtttaccccacgcgatctgcgtagaacggcacgcagctactttcctgcccttaatatttcacaggaagtatcacgtaagatcatgaatcatagtctggaaggtatcgaccgtgtatacgaccgatatgactacatggatcagatgcgagaagcccttgagagcttctcatcgtacatttcgtcgattgttgagcaaccagatttagaagaaattgaccacaaaatgaagggagatcgcctatccaccgagctgatcagagtaaacttctcatagctttttaattgcttcgacaacctgctcaacaccatcagtttgagccggaaagcggttgcggaaagctgcgagaacctcacgttcttccggagtcagcggcgctatgccctggtctcgtaaaaaatctgccagctcaggctgacggtcttcaagaaccatcatcatgagacgtactgggtccgcattcagtgcttctgccagtggtagcactttctctaccggcagcggaattcttcccttttttatcagggacaaaatgttgggattcttgtaaccaatctcacgggagatcgccgactgacttttcggcgaaacagtgattaaagaatcgatgtaggcgacgtaacgagcggtcttctcatcggccattgtcattgtagttactatcctcgcgtgatctttttgtatggtaagtacttaccgatattacagcaacggttattattgtaaagtcttacatccggctatttgtaggcaattatcgcacataaatcacgcgaaataagggataaatcagcaaaatccggtacttctgttgatttttttgattatttttgtttaagaaattacgatacatttttattaacttttatattaataggtagtaccatcacctccaaatgaaacctgttgattaggatgctattaatggaaaaattgtcatctaatttacttgctctgaatgtaggcaatgttttcgtgctgacacacctggaggctgcagaagtactatctgagttaccaaatcaccaggtaaacgttagagcgcgcgacgctactgttttccggttctccctggaaaatggctctttcacgctgatcaatactggcgacctctctttcgcggttcgaatcaactaaaatttataacccgcctataactcattgatcccctgcgcgaattgcttcctcccctgttcgcgcagtgttattttcttatatctgaaaacaatttgtttactcgataaggaaagcacatggcaaccaaacccagcaaaactgtactcaaagaggtacaggacttccgcgattccgtaaaacgcgtcgttggtcttctttcgggcaagaacattcctgtagctgaatgcggagatacagcatacgttcgctacaataaaaaggggagccagtcatggttaacatcccatccataccagatgacgcaagccctgcgcttatgaatgccatacgtggattccttgatcacgaggttggccatctccttttcacagacgaaaaagtcgtcaagaaaatgcgcaacacaaaggcattcggactctggaatgccctggaagacgtctacatcgaacgtcgcatgagtgaagtgttcaccggcagccggcgcaacctattgtccacacgtaacctcatgattgataaatattttaatccccacattaaaaaggcggtagcgatgtgccgcggggatcaacgcgagttgtttctaaagttcttcctctgtccggttctacgggcgtgggatggccaaccaacttttgctgatttcatggaggagcactggcgcctcatcgataaacctattgccgttctgaaagagtttggcgtcgatgaagctgtccgtcgtatggatagcactgaggattgcgtcaaggttgcagcagcaatggctaagatccttcgtgaaatgactgagatgccagaaggcccgttacctgaacgtgaatcctctttaaccaaaaagaccgaaccagaagaagacagttcagatgagccggctgctggagacgatactgaggtttgtgacgaagaggggctcgatagcactcctgatgagtttagctctgacgatgaagatgttgaaaaatcagacaaaacgataagtaagtacatacctagcagggatgaagtgataaatgatacagaaagtaaacctgaagatggcgatttaggccatgaaaatattgacgacttgcctgacagcgaagaaacgacagctgatgatcctgttacatctctgggctcggatgtaggggaagaagtagatgatgaaggagattacagtccctccacggatgatggctcagaggacaggcatggcagctcctctgatgacagtgaagctgtcgaagacggtgaaggtaaggcagataaagacggtggcaaggagaaggatgaaggggatcgggacacctcggatgaaagcgatgccgggtttgccccacacgctgacgatatgtctcttgatgatgctctcaaggcattagaaaacgtcgatgaagagataggttcttccaccgaagatgcgctggcgtcggcgatcaagtcggagctggccagcgcatcattatctgattaccggccatacaatcgctcctacgacttcctcgggccaattgacgaggcagaagagcatattaagcgcgccagaaaagcttttggcgcaatccctatgtattcgcccgtagatcgctaccgcattgttccagagggcagaaaactgtttgagatgaaggtggagagacatctgtcttcctcggtgtcatctaccttggccaaagacctggagcgcgcgatcgccagtcgcaaccgtgttcagttcatccctggccagcgtcgtggacgcgtacatggggcgagtctttaccgactgtcgatgaatgacgatcgggtattccggagaaaagaagaccacaaggccgtgaacgcgtgcgttcaacaggtcatcgatttgtcaggttcaatgggcggccgaaaaatcgagctcgcgctggcatccgcatacacactggctgacgccctagatcgtatccacgttccgaacgtcattaccggcttcactacgtatggcaatccggatgtagcaactatgtcgaaacgtgggtttagccgctttgaagcgcttatgctgccgattattaaaaactggcatgagaaagcgaactccccagagatacgtgctcgtatgggctgtgtggcggagactttccccctgctaaacaacgtggatggcgagagcatcgcacagctggcttctctgtttgcagggcgtatggaagacaagaagatcatgattgtgcagagcgacggcgccccatgcgctgcgggggatggctttagtaaccatctgcgctctgtaacgaatgacatcgaaaacacaagtgacatcaacctgttggccattggcattcttacggacgcgccgcgccggtattacaaaaactatgcgctagtgaataaggtcgaagagttgggtacgtcagttgtcagcgagttatctcgtatcattttagggtaaatcttgcgccctataaaataagtaactagttactataaagcctgatacattcgtatagaatagagcccagaaacgacaacaagtaaggaaaaacacatgaccgcgactgcgctaccacaagacgcccactctgatgccgtcacctgcaaatggtgcggaaaatccttccatcacctcaaatcccacatttcgatgggacgttgtgaaggcattccggaagaagccaaagggcttggtgtggatgacgtagtgaaaatgtacaccacagcattccctggggaaccaacgctgtctccaaaggccattgaagcgttaaagacgaaacgctctgagaaggctggcgcagacggcaaaatcgcggatatcagttcccaccctggctatgcagggacagtcgaatacaaaacagagcttgtcgccgcgcacgagctgcttggcctgactatcaaggaacttggcacgccccgaggcaaaccccttcaggtaacggtcaacatcaacacgccatatccggagttcgtgccagaagtgaaagccggctatatatacggcgacttcgatctgattaaagacatcttcatgatgctggagatcggcattcctggttatctgtggggtcatgctggtacggggaaaacctccctgccaacccagctttgcgcgctcctgaatcgcccggtgatccgctcacagcatacggcatcaactgaggaagcccatattacgggccagattctggcacgagaaggcacaacctactttgaaccagggcttctgtcgctggcgatgaagaacggttgggtctatctggcagacgaatacgattttgcattcccgcagattctggggatctaccagccagttctggaaggcgaaccactcgtaatcaaagaagcgacaccagactggcgtcgcgtggctccgcataagcgcttcgccttcatcggtacaggcaacactaatggttcaggggatgaaacggggctttatcaaggaacgaacatccagaacgcggctaacttctctcgctttggcatcgtatctcacgtcaagtacatgaagcctggtgctgaggtaaacatgctggtcgaagcgggaatcatccgtgaatacgccgaaaaaatggttaagttcgccaatctggtacgagacgggtatgagcaacacctgatcagccaaccaatcggcccgcgtgagctgcttctgtccgcaaaaatcggaatgatgcgaggtgatttcgcagccggcatcgagaagtcattcatcaataaactcccctccacctctgcgcaagcggcgcgtgaagtggttcagaaaatcttcggttaatcgtgcgtaaaggttgttttggatctcttatcgcagcttctgaaactggcgcggcctgtttgtcatgtgctcacaggccagactgccaccaggcagccaaaggagttgcgatttcgatatacgggaagttcgtcggcttccccaacgacaaaattaagaaaaaacagaaggtaaaaacacatgaaagcactgatggtcaggactgatttttccctgggagaatcagcactgaaagcagagcacgcagtaaaggtagcaaaggaggctggctataccgcggttatctctgctgacacgatgaatatcgccagcgttatccccctgcaacgagcagctggcgatgagatggcggtgatctgtggtgttaagctgaatgttgtcgacgatccaacatacgagtaccgggctaaactggccaaagagtctaatggatgtatggaatcattggagcgtggacgtaactactgcttcaccgcactgattaaaaacgagcaaggttatcgcgacatttgcgaactaatgactttagccaatacccgcgagcagttttacttcgtaccacgtctggcgctcgaacagctggcggctacttacgctaaaggcaatatactgttgctgacttcggatatcggcagcgtattccagcgcccggacttcgctaaaattattagcgcgctgattgctgccggcggacgcgagaatttctacagcgtagtttatccgcaccctacgccattctatgaccagatcaacgtgcgagccatgaaagtggcaagcgcactgaaaatcgagcccgttgcgttttacccagcttattacgaaggggttgatgacgctgacatcaaagacatcgcccacatggtgatgaacaatatcaaagtcgatcagccacaccggctgcgtatcccccaccagcgcgacaatgcaataaatggtcgccgtcatctgctgcaggctctgaaagagttttctgtccggatgggcgtatctgtatctgccgccatggcttctacaacgcaggacgccatcgttaaggcgtgcgaatggcgctggcacgagatggcgccgacactgccaaaaatggcagacgatgagcctgcaacgttgatgaagctggctgtcgcagggcttcgaaaacgtctcagcaacaaagaatttggctacacgccaccagcttccgagcaccgcgtttacgtcgatcgcctcaagtatgaaattgagacgctcactcgcctgggattctgcggttatttcctgatggttcgcgatctgatgaatcatagtcgcgagactggtattcctgtcgggccaggtcgtggttcatccgccggctctctggtggcatggtgcatcggcattactaacgttgacccaatccgtcatggtcttctgttcgaacgtttcattaaccctgaacgtctcgacttgccggatgctgatctggactttagccaggcgcggcgccatgaggtgatcgagtatctgaatgcccgatatggcgaagagtatgttgcaggcattccgaacttcacttatctgggcgccgcttccgcactgcgcgacacagcgcgtatttatggagttgatgcggcggatatggctgtttccaaggagctaaagaccctggaggatgacagtttatctctgtcggagctgcgcgagcagctggccagcctggacaagtacgccaccaaacatccggacgcatttaaggcggcgagcaagttgcaaaacctgatgcgtggcttcggccggcatgctgcagggatgattgtcgctggcgtacctctgacggaacgtacccctgtagagcgacgtggagacgcgcgttgcatcgcattcgataaacgatactgcgaggccatggggctgatcaaactggacgttctgggcctggccactctcgatctgctggatagcgcaaaacgttacatcaaagagagcaccggcaaggacatcaacctcgatgccatcccactggatgatcgcaaagtacttgatggattcgccgcggggtatacgcaaggtgtgttccagcttgagtccggccccatgaggaagctactcaaagatctgggtggtggtatcgagccaatgagcttcaaaaccattgtggccacaactgcgcttttcagaccaggtccaattcagtcaggcatgttggacgactatgtctccgtggcaaaaggttttatggctccacattcaattcatccgcgtcttgaggaagctactaaagaaaccaacggcgttttactctatcaagagcagatcatgaaaagctctcgcgtactcgctggattctctatggctgaggctgacgctctgcgttccgctatcggtaaaaagaacatggataagatgaaagcgatcggcagcgattttgtagaacgagcgcaagcaggttgggtgacactgtcacttgaaaacggaagcacagtagaagtccacaaaaaggccaagctgatgtgctctgacggcaaacgcagaacctatgacgaagcgattggtgataacgctgatattgttgattttggagtttgacggtggaagaaatttggaaatccattcctgagtttgaaggttattacgaagcatccagtttaggtcgcattcgctctttagatgttatacgaacagcccccaatgggggcgaatgggtgaagaaggggcaaatcctcaaacctcgcgtaatcaatgattttggacatctgggcgtgaaactaagcgtcaacggcgtcaaatgcgaccgcacagttcattatctggtagcaactgcattccacggagaacgaccagaaggcttacttattcgtcatcttgacggaagaccatcaaacaatgcgccctccaatctcgcgtatggcactcaagtcgacaacatggctgacgccattgcacacgataccgttgagtttggtgagaggcgctacaacgccaagctaaccaacgaagtcgtcattgctattcgcattaaaaagtcagaaggcgctctgaacaaagacctcgcggccgaatatggtttaactgagctttacattcaccatatcgtcaccgggaagaaatgggcacgagctggtgggccgatcgttgtctcaagagcatccaaaaaactggatgctgaagcaagagctgaggtggtcgccttgcgcaaggctggcgcaacctatgaaaagttgcgagaaaaattcggcatctctaacactcaaatcgcaaatatctttaaaaaagctagcgtttgaagctaatgacgggaaaaacacatgaaaattgccaaagttatttccgagcaggaaggtcttagccctgagaaagcccaagaagtatgggacgcctttgagaagttcggtggatatgccttcaacaaatcacactccgttgcctactcgctgatcagctatcagtctatgtggttaaagacacattaccctgctgagttcttcgctgctgctctcaccattctgggcgaggataagcaccaggggctggttaaggatgcgctgacctatggcattcgcgtattgccaccagacgttaacgtgtcatctaaccgaattgagatccgcacgctggaagacggcagccaggttctgtatgcgccattctctgctgtgaaaggctgctctgagaatggttgccaggccatcatgagagcgcgtgagaaagttggcggcaaattcgagtcacttgagcaatttgaggaagcggtcgagaagcgagcctgtaacagccgagtacgtgagtctctacaaaaggttggtgcattcgcctctattgaacctggcagtatgccggcgaccgatccggaacgtctgcgcgatcaggcagagctgatgggcaatctggtgatcgatgcggtgaaagcttcacgcccatttgaaatgaacccaaaacgctctgcagaggtcaatgtgctgatgactcgcatggccgcagaaatgggtctgggcgatgagttgatacgaccaagcatcggcattaagccaaaaattatggtcatactcgacaacgccaatggcaatgatgcacgtaccggctacttcatggagaacggctacgatgacttcaaagccaagttgctggtttctggtgacctgcgtatgggtgatttgtatgtcacaggcgtgtgtaaaaaggtaaaggataaggaaaaagactacaccaaagatgagatcggccagtttatcgactttatgcgggaagagataaatctggttcgtccaacttacgtgctgacgtgcggcagccgggcgacatcgctgtttaataacaagagcaagccatccgatcttgttgggcgcaaagaatatctgccagacctggacgtgaccgtgttctatggatttaacccgaatattttgtacttccgtccagaggaaggagaaaagctggaagccattctggcagaggttgcggagactattaacaaatgagtaaaggaaaacacatgagcgcagcggataaaattgcacaagagctcacagcaataccacaggagtttcaggataaggcgattgaagccactctgcgatcccagttctgggaaattattgactgccctgtcacgctcgatctggcattggcgtttgcaaagcaggatggcgccgaccctatttgtcgattacggaaatgcgcgcgtgcgctggcattaaaaacgcaagatccaaaggcgtgccaatatctgctggagatttatgaatctgacaaaccagaagaagagctggcttcatttaaagcgttccgtgcccgtcttgtcctgaaggtggccaaggagttcatggaggtgagtaagataggcgacgtcagaagataccggcttaagaggcagaccagagtcactctatcaaacattttcggtagaaaagtagcataaagaaacccgccatatggcgggttttctcatggagttagtagagaagccgtccagatctaacgacctttaactccttccaataatccttccaaactgactactcaggctcaggccgtcatcgttatcgcagcggatagattaccgaaatgaaattagctcaacgtaactacgtttgaagcagcagggcctttagcaccgttctcaatagagaactcaactttttggccttcttccagggtacggaagttgttgctctggatggcagagaaatgtacgaacacgtctttgctgccgtctgctggggtaataaaaccgaagcctttatcagcgttaaaccattttactaaaccagtcattttgttagacatagagattaccttcattatttgagagccacacaacgcggcgaaattggtctgagagattggtacttacttgggcacttaggaggagactcacggagaagggtaatctttggataacacctgaacttcggactgctttactaaaactgctttcataaggtctgtcttgcaaaccgacgcaatcattaacgcatggcctttctgtttgtgcaacatttattttccttttcacagcgtcgccacataaacgtctctacccaacctaccccctctcatcttcacgacacatgctccatcagctgatttcttcatggtactattgatataaattagtaagtggatacataacaaaatgagcaccgaaatttacgaaaaaatcatgaccgatctggagttcgatcgcgacaatcttgaagaggtctggcggcagcaaccgaggctgttgatggagtacggcgcaaaactagcgcgcgcagaacgagaggttgcagatgctaaactatccctcgatgccatagaggcaaaaatttacgacattgaacgtaagaatctgagtatgaacggaataaagttcaatgaatcggtactggaagctaaggttcgcacaagcccacaataccttgcgaagcgccaaaaactggatgacgcacgtctgatcgctgacatctataagcacgctgtcaccgccttctctcaccgtagagacatgatcgtgcaggcctcgaaaatggctatcgtagagattgaacgactgggcgccgaacgcttcaccgccacccgataatttttgatagatagtaagtaagtagtgatctattattatgtacgattttaagagccacgaacaagcgaatgccccaagcgcaaagcgcccatggccataatcacaacaaggagaaatacatgtctaagtcattacttgatctgcttaacaagacccgcggcgatattgcttccaaacgaggcaacaacgtcgacctaacccgcctgaaagacggtaataactatctgcgcatcttccccaacaaggacgatcagaacggtgtgttcttccagactttcggtatgcactacgttaagcatcagaatgaggagggcaaagaagttaccactgcctatatctgcgaacagcacacccacaatcgtgcgtgccagctgtgtgagatggtgatggaaggtcgcgctcgctacaaaggcaacaaggcaatggaagagcgtatcggtcaaatgcgcgctactccacgctacctggtcaatggcgtactttcagctcgtgaagactttggcgacgcagaaaaatgtcagctgattgagctcccgtccactgtgttcgacgatatctgcaaagtgatgtctgaggatatcgcagatgatatcggcaacccgttaagcaaagaagaaggctatgcgttcctgatcaaacgcaccggctccggtcgcgataccaagtacgacgtatccccaaaacgtaaagtctacaagggcgatatccctgaaaaactgtggtcgacccagcatgacctgatcgcttacgccaatcaggctgatgaaactcgtctgctgtctaccgttcgcaccatggggcgtctcattggtattgcagcacctgccgccgccaccgctgctatttccgcaccagctgctgcaagcgcagcaacgctgcctggttttggcaccatcactggccatacggaaggtgcagctgctgttgccacgacctctaccccggaaccagcaaaaacatctctggtagacgaagagatcttacgtgccgcagaagctgagttcgtaccagagccggaagaagttaaagcatcagctgctgccgccactaccactgcagccgcgaccagcacttctaatgacgatgagggtcttgacgatctgctggcggaattagaatcgctttaatcacaggccatgactgttaaggcgtctacggacgccttactttttggaaggagttttccggtgaattatctctttgtggacggtaacagcctgggctattaccaccagcaatctgacaaattacataacggcgaaatggaagttcaggcggtgtttggcttcgtcaaaaacgttcgtcgctatgcgtccattcttcacgcacgccccatgatcctgtgggacggctttagcgacaagcgtcgcgactattacccggattacaaagcaaatcgcgatgaagatccggaaatgaagaagatgaaagaaggctttgcagtccagaagccttacatcctgaaaatgatggcagcccttggcatcaaccagctgatcgccaaagacgccgaggccgatgacctggcggggatgctggttggtcgtcttgcgccacaaccaacggtcgatcatatctacctgctcaccggcgacggcgactggctgcagctggttcgagaaaaagtcagctgggtgagccttcgtgaagacgccaaacacaagcaggtgaactttgagcagttcccaaagctgatcggcctgcctactcctcgtgctttcctcgaagccaaagctctgcagggggatacctccgacaacatcaaaggtgtaggcggaattggtgacggtggcgccaaggagctgctgcacgaatggggaagcgtcgccgctatggtgcgcggcattaacgacggctcgatcgtcatcaataaaggccgatacaaaacggcattcaacaaactggccaaaaatgccttcaacgagaagaccggctgccggatgctggaagccttcaaacgcaacatgacgctgatgaacctcatcgataccaagttcccacccagcgaaatcgaaaagataaaaggcgcacgtgatttgaaagccttcgaactgctctgccatgagctgaacttccggtcattcctggaagatctggacgtgttcgttttgccttttgagaggtactgctgatgttgaaatcactcatcaacggcaatacgaccacgcctacgatgctggctaaggagattgtcttcttccatggagaacatgccgttgttgcgctaccgcgcattctaggcgcggccggcatgagcgtgacagagcgagagtacgggctgattagcgaacaggtcgtcaagatcctctcccgcatggccaaacacctcaaccacggcgcaataaagtttgatgaagccgccgcttccaaacgcatcaacgagacaaaaggagcctaagaatggcaaaaggaaaatcagcactggcaatggcgttaaaaaagaaaatcggcagcaatgatgagatccaaaaggtttcacactggattgattccggcttccctccgctgaataaagccatctccgggcgctatgacggcggtttcccaagcggacgtatcgttgagatctttgggccgccaagtgctggtaaaaccttcctggcgacggccgccatggtctccgctcagaaacaggagggtctggctgtattcctcgaccacgaaaacagctttgatgttggtctggcggtggcaaacggcctgaatgcggatgaggatgacggccagtgggtctataagcagccggacacgttcgaagaatcggttgagctgatcggcaccatcctgaaactggtgcgagacgaagagctgatccccgcagacgcccctatttgcatcgtagccgactctcttgcgtcaatggtgccaaactccaaagccgagaagttcgacaaaatggcggaaggtacagcgaaggataaagatcagctaaacatgaacgacaatacggccctggctcgtgctacgagcgccaactttccgacgctggcgctctgggcgcgcaagtacaatgcctgcattattttccttaaccaggttcgtacaaaaatcggcgtgatgtttggcgatccaaccacctcccctggtggtgattctccgaagttctacgcctcagtacgtattcgtcttggcgcttctgttatgaaggatggcaaagataagatcggtcaggacgttggcgccgagtgcatcaaaaacaaagtggcaccgccattcggcaaatgctcatggaaattctacttcgacccgacccgcggtctggacgttatcgagtcactggttgagcacatgctcgaagaaggatacctgccaaagaatgccagcggccgcgtagagattggcgacaagaagtacaccaaatcgcagatcgtcgatatgtatcgtgataagccccttccggagatcattgcggcgctacagaccatcgacgaacgtcgagctaaagagtctgcttcagccgaaacagaagaagcgtaatcacagggcgtccattggacgcctttatattttgtttattatcaccaataagaaaacaacttggttactaatatgaaattaatcccaattccaacgtcaaatgtgacagtgccacgcagttaccgggtagccatcctagacgcctggtggttggtgaaggaagaatcaaagtgaagagactctgggatgcggccaatgccgcgctcgatgttatcgacgcagaaatcgcacaaggcttacctgagcctgaatgggctgctcagctgcgcgaggtcattggtctaatagatgagccatcacctgaacaggacgattgctccccttctctcgaacagaataataagtaagtacatacaccacaaaggagaaacacatgagaatattagtttggatatcagccagtactgacagtgatgtttagccactgcttataatgtatggctctggactctccatccttagggatctctaggccttagcgctcttccgtagccatttacacctcaaaatatataagttagtatttacctattatgaagatatacatagatatcttgttactcatcttttcaatactgtttatgttggactgcctgatgatcgggacactcaagaaagctctgtctcctgtcaacggaaccactgtgaacatgctcgcactggtgctggtcatcacctctacagcacaggtctacacagggatagtggtatgagaaaaataacgctactgctggccgccctctccttctctctgctggcggataccagaatttaccaatgcgatatgaccgtatcgcaggtgaaaaatgatcaaatcagcagacctactaaagctgacttcggcgcgctagtcgttgatagcggagagcagttctatgtcgtccgcggcgatgaggttctctcatctccatatctggctaaacgcaacggtaaactggttggcgttggcgaggacaagcttatctacaacaaatcccacgacgtctacggcgttcatagcaaagaccaaagtttctttttcgacggatgtaaggaggttggttaatggctctcacaatgactggtctggagattgagaaaacaagcggctactggagagcgaaaggcttccgaaaaccggacatgttggagcgtctggaacgcgaagacggttacatcatccaccagcgtcgggaatggcgcatgtttgatcctgaaaccgggaaactcacatcgaaagcacaaacgctttggggtctgctcaagcagatccactaaccgaagtttctacagagcgttttaagtgtggtggaataacaattgttagtaaccaccaacctagcattcatgcgggttaacaggttagtgaccactggggaagccatattgttatctacacgggcctggcgcaaatcaacgactgcgtcgcccgttttcaggatatctaattcagtgctgtattaccgctcacggcatacgttgccagtgaattaccgctggcagcataccttgtaccgctcacagcatacgttttaccgctgacagcatacattcatagggcagcagttgctcttagacgttagccatgtcgatttataaagaccgcagatagtggaaatgtaccgctgacagcatacgttttaccgctgacagcatacattgagacaaaagaaccgctgacagcatatgttgaaccgctgacagcgtatcaaagcaacttgaggctattggtgagtatctcgatcagcttgatattctctggcgtcaggttctgcgacagctcagaaattttgtttttgaggttctgtttcgcatcaatttcacccttcgcttcttctgcctgcttaggcgcctctggcttctcgggtttgctcgatgtgactttcagttttgggttacgactgtggatctggatgtagacagaacggccacgcttaacctcgctatattcgagatagcccagctcttgcagtgacttcaatccgttcctgatagtctggttttgcgagctgacgttgcgcgtgctcagattgagcctggcgcgcagtcgggcaagagataccggtgccggcttaggaggaagactttcgatgaaagtatacagcgcctgggccgtctctttgcgcgggagcttgttgatgaccttcaactgcagcagaactttatggtcaaagcgatagagctcagacagcttaggttcagcataaaagacaatggagtctttcttctcgttgtaatcaacgctgtttatgaggtgaaccatcaacagggatatcttgttggtgtcgtcgacgttcttctcttcatgagtgcgctggaacgacaacgtcgtgcgcatgatcttgagcaggctgtttgtcaggcggtctcgcagggtcttgcggatctgcgaggacgggtagccgcagaacttggcgaacttcgtgatgctcagctctacgcgccctgttggctcgccgtattcagccagagagcgaacaacaccaacccaggttttgaagtcatgatccatatccagccgcggaccggtgattttaatgtttgaataaccctctgaccgcgcgacttcaagctggacaagctccctggatgcgtcgatcatgttggacttgttgcgagagctattcttcgttcccttgagcgttggaacaaagaggccaaggcgcattaaagcgattggctgcaccgtattgttgctgttaggaactaagtcacctgtgtacaaattgagagcatcttcctcaagaatttcgttatcttcaggtatttttttgatttcactatcttttttcttttttgtggacatgtggataccttttggttctaaccgctgacagcatacgtcaattaccgctgatagcatacacaaaaccgttggcagcatataccgtaccgctgacagcatatcgtttaccgctgacagcatacacggatcagtccttagcccaggcgtggcgcggcctgcggcgatcggggatctctttggatctatatggggatctgtatagggatcttattattgggatctaaccagtggataagtggataagtaaaacaggcttttgcgattacaggtgtgcctagtaagctatcgtggttccggtcaacaatcactaaaacgagaacatggacttaaaacgcacacgttgggtacgccgtctggaagacggaacctacaccatagaatcaaactccacactgagcaacgagaaggttctctgcagcctgtgtggcatagcctcgaagtgcaacatcaacgagacccgactcaagttgcgtgacgcaggcgttaacttccacctgaacagctgtgccagatacgtaccgctgctggcatttcgaaaaccgatcatcggtctggataccccctacttcaacactatgcgttcaggcgttacctggcgtgacagattgaccgaggggaagattatctgcctggttgaagctgatactgcaaagatccttcgattcggtgtcgtggataaggtttactctgggccagttgatgagatgctgagaaagcacagtcgattcaatcacctctgtatgggcggagagaagatcgaaaaagtgggtgaagtgatccgccgatcctatggccacttcctgaaagaagacagcctgctcacagcgatttacataagacacatcaaacgggactttgatatcgagtatcacagcgaagaagaactcgatttagtcgaccctcggccaaaagcagaagtgtttagcatcgcaaatgcgcgtcagaagctctctgacgaaccctaaacgaacaaaggggtctttacgcgaatacaaaattgcgtagcttagaatgcatctgagaagccaagggggtgatatatggacgatttttactcaagagagattactctggctgatatgccctttctgatgcatgaattcgaggaaggcgttcttcttgctcactttgcagtatgctccatgcaataagccagctaatgcattgaaaataaaatatagctctcattatgaagatttaaatccattactctgtacgttattttgaacgcaagttgtatactacttattgggttttgatgaagaccttgactaagttctcctttctctcaaaagaggacattccaagcatacagctcaatgtatttctacgaaaccttaattataagagccctgatttaagggctcttaatagtaattagtcaattatatgagctaaagctgctaaaatatttgtgattaagtttctagggaggttaggttttttgaaaaattcactgatgtaactctaaatacactttcttcaaattttacattcagaactgtaaaatttccaacccttagtctttttttatcttctccaaaatcatatctttgatggaaacattattatccnnnnnnnnnnnnnnnnnnnnnnnnnnnnnnnnnnnnnnnnnnnnnnnnnnnnnnnnnnnnnnnnnnnnnnnnnnnnnnnnnnnnnnnnnnnnnnnnnnnnnnnnnnnnnnnnnnnnnnnnnnnnnnnnnnnnnnnnnnnnnnnnnnnnnnnnnnnnnnnnnnnnnnnnnnnnnnnnnnnnnnnnnnnnnnnnnnnnnnnnnnnnnnnnnnnnnnnnnnnnnnnnnnnnnnnnnnnnnnnnnnnnnnnnnnnnnnnnnnnnnnnnnnnnnnnnnnntacaaagacaaaggggattaggataattccgacccccatacatttcaaatattccaatgtggttaggttaaacattagctgttcctagcaaaagctaaaagtattgaaaggtactataatgggaacataaaaatatgtccataggtgttgaataaacgactttaaattacgttttatccttacaagcggataagaggtctcaacgtttatgtgtgtagactttagtttggtgcagttttataacttaaatgaaaattagactcactttcattaatcattgagtattaagctcactgcaatcataccttccctatcaatactgctcaactgtcagtcataaatataaggcgctaaatgtctgttacgtgtagtgtttagaataatgttcctaactacttttccgttatccacgctgagaccacacctagatcctagatcatacataagtgtctagctctatcttataaaaataggtatgtacttacttattttttttgcaataatatcccgcctgtattttttataatgtgccgtgcttagttggttgttggcctgttttacatgcttaaaatttatatcaaaataaccacaaaggaaaattcacatgacgttgccatatggggtgatctccgatccccattaccacaaatgggattcattctcgacgaccgatgcagatggtctcaattctcggctagccattcagctggaggccacaaaagaagcggccatcgctatgaaaaaagcgggctgcagccacatgctggtggccggcgacacattccacgtccgcggaaccgtatcccctaccgtactcaactacgtctccgatgcgtatgagtggatcgtcaaagatctggggctcagcgttgcgatgctggctggcaaccatgacctcgaaacaaacgactctgtctacagcgctaacgccgctgcggcgctgaagtcgattggtgtacagatcgtctgcggccgtaagccacacagcatcaaattgggtgacgtcacagtccatatggtgagctggcgaaataaccacgccgagttaattagcgacctgaaagcacttcgtgcgcggcttgacggggatctgcacgacgtcgtgattcataccgccatcaacaaagctatcccaacaatgcctgatgttggcatcgatgcgcaggagctgaaagacataggctttcgcctggtactgtccggccattaccacaaccacaaggaggtgatccccggagttatcagtgtcggcgcgctgacgcaccaaaactggggggacgtaggttcgctggcgggctacatgattgtgaaccctgacggctcgttcagtcatttcgaaacctcggcgccgaaattcgtaaacctggaagacgatgtggatgacaagcagatacgcggcaattacgtgcgcttccgggccgtcgtcgaaaacgatgaggaaggcatcaagctgcagaacgtcctgaagtccatgggagcgaaaggtgttgtatgcaacttcatccgcaagggctcaatgatggagggtactgccagtacctcagagaccagcaaaatcgacagccttggcgagtctgtttctgcttactgcaaaatcgttcatgacacagacggtggatttgacctgaccaaactgaatgccttgtgtcaggagatcctcaccgaagcggaaagtgcggaggcggtgtagtgacttcctcccacaataatttctgggatttcatccagatgattaaacggcttgaaagcgggaagcccgttttattccagaagccctatccgccagaaggaaacccacaggcgttttaccttggtcaactaacgaaacgtggcctcctgtcacgcaactccttcccggcacatacggaataccgccttcgcaaagggcagaaattgactaaagcaattcgaggcaaagcatgaaatttttaacgctcgaagtggaaaacttcatggcgctggcaaacgccaaggtcgagcttgatcagcgtgggctggtgctcatccagggtgttaatgccggggactcatcggccgccagcaatggcgctggcaaatcaaccctcatgaatagtttgatgtggtgtatttatggcgagacatcccatggcgttaaaggtgacgacgttctctctacgggccatgagaagaactgtcgagtaaaagtcaccattgaagacgaaggtaaacgctacgccattatccgtcaccgcaagcataaggaatttaaaaaccggcttattgtccgtggcgaagacggcgacatgacaaagggtaaagattcgctcacccaggagtttgtagagcgactgatcggtgcgtcaaaagaagtatttatggcatcgatctatgccagtcaggaggcgatgcctgatttgcctggcatgtcggataaaaacctcaaaaccatcgtagaagaggctgccggcgtcgatcgtctcaccaaagcctacgctattgctcgcgaacgagccaacgcagctgccgcacgcatggagaccactaaaaccaagatggacgcctgcttgtctctggtcgaatcggcccagaatgagctggagtctgccaaaacctcttctgaagcctgggagcgagaccgcagcgaacggcttgatgtcgcccgtgccgatctggttggggcggaagtcacgctcactgaggtcgaaatggagttgcgcagtctgccagagcagatccgcgatactgaaaatgccatcggtaaagagcgggaaaaacttgcgtccaaagaagaacatgacgccaagctggttaaggttcgtggagcgatcactgatatacgtgccagcatccgcattaccgaaaacatccagaaggaagcgatgcaacgtgctcgcgcactcaaggtgaaagcggaagaagtaaataccaaagtcggagagccgtgccctacctgtggcaaggcttattgcgttgaagatctgtctaccgtgaaggagagttttgttgaacaggcgcgcagtgagatcagccaagcgcaggcatctgcaacgtcagtggctaaataccaagagcatcttgagaaggcgctcaaaattgaatcatcacttgtcgccagtacaccagatgtgtctgccattatttcccgaatcgaacaactgactaaagagctgggaacgcttcgtcatcgggaaaaagaagtcgtggctgtagaagctttggttgcccgggcgcggagcgaagtagatcgcattaccaaagaaactaacccatttctggctgtcatcaaacgccatgaagaaagcctggctgccaataaatctaactatggtgtacttaaaactgagttaaagaatatacaggagcaggctctgctgcttgataaagcgcgccaggtctactctcctgccggagttcgctcgcatatcctgacctccgtgacgcctttcctgaatgcccagacagcggaatatctcaatacactgtcagacggaaacattgttgcggaatggtcaacgatggaatcaaccaagaagggcgagtggcgcgataagttcaatatcagcgtgcgcaagatcggcgccagcaaaaccttccagacattgtcaggtggcgaaaaacgcaaagtgcgcattgcgtgctccctggctctgcaggatctggtggccagccgcgcgagcaagaacatcgagctgtttatcggtgatgaaattgacgatgcgctggatactgccgggctggagcgtctgatggggattctggaagcaaaagcgcgcgagcgcggcacggtgatgatcatttctcacaaagaaatgaagtcatggttccgggaaaccatcacagtggaagtgaaagagggtcgcagctatgtcgtttaatcttagccgcccgcagtttttgcaaatgtttgctgtgatgcagtcattcaggctgattaacagctataccgctgctggggcggctcctggtgtcggttggcaaaatctcaatattgagacggagcagtttacggctctgaaagatctacttttcaagaccccgttaatgccaagtctgaaatcgatgccgtcaggaagtacagcgcccattctgatcaacccattttcggaaggtggctatcttccacacactgggcctgggttcgtggtgatcccggaatcacctgagatggttatcaaagatgatgcgcagtacggggctatagaggcgcataccagcagcgcgtttactaacctgactcgactggcaaatgcacgtgctgggcaggttgcaatgccaggcaaggcatttgctggcatcgatttcaattacgatacacttgagacatttccaggaagaggcaaattaagctttgagactgaagatggcgataaggcaatggttgagctctctgtcccctatgtacttcgttttaacgggatggttgcgcgtaagctgatagatatcatgtcctacttcatcgggcagagcatgatcgacgcagacatagaaaatggtgtgctgaccagtgacaacatacatgtggtgagccgcattccagagcccgttcgcaagtctccagttaaaaccctggaagagaaattaatggaatgcccggtatgggcaacatggtaaggaaactctatgagtaaagtgatcaaagtagttggcgtcgacccttcaatgagcaacttcgggctggccattggtacgctggatctggatacagacaaacttgaaatccacggtcttgaactggttgaaaccaaagccggcggaacgaagaaaaccgtcagagtaaacagcgatgatctgcgccgggccaaagagatctggcgcaccgccaggcccatcattgaacaggcccacatagtgttttgtgaactgccggtaggtagtcaaagctctcgcgcgcagacttcttacggtgtgtgtatcggcgttcttgcttgcgttgataagccacttatccaggttacgccaaatgaaattaagcactacgtcgggaataaactgaccacatctaaagaagagatcatccagtgggcgattgcaaaacagcctgatgccccttggttgcgtcggaaacaagcgggaaaagacgtactcgttgccaagaatgagcacctggctgatgccatagcttcgatatattctggaatgcagacagaccagttccgacaagtgcgcgacgttcttaaagggattttataatcctcaattgataggtaagtacttatttaatactataggccactacatttagtggccttttttgatgggtgatacatgataaggattgtcaaacgtaatggctccacagagccgctatccgaagagaagtacaaccgcgtcgtgatgtggggggtagaaggtatacgtaacgtaagcgcctctgccgtagccatgggcgccgccgcgagcatctttgacggcatgacaacttcgcagcttcatgaggcattggttaagtcggctgcagatcttatttcgcctgaaactccgaactactcccaggtcgcagcacgcctgaacatgttcaaaattcgcaaagatgccttcggcgaatacgcttacccaagtttctatcatcatatcgtcagcaacgtcagccgcggcgtttacgatgaggatttgcttaagttttactcccgcgaagagatcgctgaacttggcgtgtatatcaaacccatgcgtgacgaactctttggctatgccgcgactgttcagctggcgagtaagtacctcgtccagaaccgagtcaccggcgaaatctacgaagccccgcagcagctgtatatgctggtgggtatgtgtcttttccagaattgggaagatggttgtgccggcaaaacacgtctggaaatggtgaaggggttctatgatgtcaccagtacattcaaattgtctctgcccaccccaatcatggccggcgtccgtaccccgacgcgccagttctccagctgcgttctgattgagtccgaagacagtttgaaagggatcagcgctgcgtcatctgccattatcgattacgtgtcgcgtcgtgctggcattgggattggttttggccgactgcgtgcattggggagtgagatccgcaatggagaagccacccacactggcgtaatcccctttctgaaacacttccagaccgctgtgaaatcatgctcgcagggtggcgttcgagggggcgcagcgacggctttctaccctatttggcatctggaagttgaaagtctgctggtattgaagaataaccgcggcatcgaggagaaccgtgttcgtcatctggactatggcgtaatgatcaaccgcctgatgtatcgccgcctggtacgcaacgagaatattacgctgttcagcccgcatgatgtaccggggctctatgatgctttctttgttgatcaggacaaattcgaagcgctgtacctgcaatatgaagctgatgagagcatccgcaagaaatccgttcccgctgttgatctgttctcaaccctgatgcaggaacgagcctctaccggccgcgtgtatattgcgaacgttgaccacatgaacgaacacggcgccttcgatccgaaagtcgctccagttcaccagtcaaacttatgcatggagattacgctgccaactaaaccgctggcgtttaccgatgaccccgatggtgagatcgccctttgcacactgtctgcgtttaatctgggggcattacgctcactggacacgctgaaagaggttgcattctatgcggtggctgcgctcgattccctactcgactatcaggattacccgatggccgcagcggaaattccggcaaaagcacgtcgtagtttgggcgtcggcgttaccaatcttgcgtactatctggcgaagaacggatttaactactctgatccggccggcaaccagctggtgcatgaaacgtttgaagcgatccagtattacctgcttgatgcaagttgccggctggcggaagccaaaggtgcctgtgattggttttcccaaactaaatatgcccagggacagctgccgattgaccattaccgcaagtcgcttgacgctaaccctgatacgtcctttgagctgaaaatgccttgggaagagctgcgcgaccgcatacgcgaatatggtctgcgtaactctaccctgacagctcagatgccgtgcgaaacgtccagccaaatcaccaactccacaaatggtatcgaaccgccgcgtggccctgtttccgtgaaatcatccaaagacggcattgtgaaaatggtggttccggactttgctgagctgaaagatcagtacgagtacctttgggatatgccggataaccgcggctatctgaccaaagttgcgatcattcagaagttctttgaccaggctatttcagccaacaccaactatgaccctactcgcttcccgggcgacaaggttccaatgatgaagttgcttgaagatctgctcttcgcttatcagcaaggcgtgaagacgctttattaccacaacacacgagatggtgccggtaagcgtgaagacgatgatctggcctctgttgcgttggttgagccagaagatgagtgcgatggtgcatgcaaaatctaataagcgtggggagatatccccacctttcacttcattgaatgcctcattttaaccaataagataataatttgtttagaagtgcatctaatcaaattgtttaataataccgataacattcaaagggaaacacatgagttactccactttccgtttgggcgctaacgacgcaaccaaagagcctatgttcctcgggcagtctgtcaacgttgcgcgctacgatcagcagaagtaccgcgatttcgaaaagctgatcgaaaaacagctctccttcttctggcgcccggaagaagtcgacataaccaccgatcgcatcgatttcaatactaagctgcaagagcatgagcggcacattttcctgagcaacctccgttaccagactctgctggattccgttcagggacgcagcccaaacgcaacgctgctgccgcttatttcaattccagagctcgaaacgtgggtggaaacatggtcgttctctgaaaccattcacagccgcagctacacccacattattcgcggtatggtggatgatccgagcattgtcttcgatggcattgtgaccgacgaggaaattatcagccgggctatcagtatctctacagagtacgacaagctctatgagatgacctgcgcgcgccagcacctgggagaagatgaattcgaacggctctacgtctccgaatttgacggaaagccctaccctctccagcgccagctgttccgtactttggtatccatcaacgcgctggaggccattcgtttttacgttagcttcgcctgtacgtttgcttttggagaaaggaaattacttgagggcaacaccaaaatcatgcgtttcattgcgcgcgatgaggcgcttcattgcgaaggcacagaacgaatgctccggtttatgcgtacaggccgcgaaggcttgctatgggcccagatcgctgcggatgaggaaccattcatctatcagaccatgatggacgttgccgaacaggaaatgcgctgggcagattatctgtttaaagacggctcaatgattggtttaaacgccgatatcctgaaaagctatgttaaataccgaaccaatcttgcgatgcgccgtcttggcctgaaaccactgtacccggagataaaagatgacccgctggtgtggatgaacaaatggctgttgtccgacaccttgcagattgcaccgcaggaagctgagcaaagcacttatctcgttggccagattgactccgctgttgatcgcgctggcctaagccagtttgccgatttgtaagcctggataaagattttgtggcctggtcgctctgggccacaatgaacgcgaaaaaaagcactaaggaaagataaagcatgaaattaacgaaactgaccgaccatctcaagctggccaccgataaactggtgggcttcaaaccagagccatatgagctgaaccccggttttggagaagcgacagagagtatttacaagatggttgaccagttccacgagctgtttcagcacccgcgtcgtgtaatgcccactccggagctgctgcgcctgcgcgctaagctgatccatgaagaggcggtagaagaagggctgcctgcagcgaaaaaaggggatatgcagggattgctggatgcaatggctgacttcctgtatgtgggtgtcgggacgatggtagccatcaaaggtgggctatcaactggcatgagctactacactcaggagcaaagcgtcgatcgctttattcataccattatggtgcctggaaataccgtcttcgacgatatggccatccccttcaatgaagcagaagaagctgcgcttatgttggccgcgctggccgataaacttgaacataacaaggtaggtgatgctgagctgattcaggatctgcgccgcgtgatgaacaaaatctatgtggcgtgcatgatggtgtatcgcctggctgaattccttggcgtcgacgtcgtggagctggtggcggagatccaccgttctaatatgacaaagctgtggccggcggatgctgaagcgcgtcgtcttgccgttgagagatgtagatatgataagaatgacctcggattccgccatgctgacggcactgacatgatgatcggctatcgcctgtctgatggaaaaatccttaaatcgccgacatatagcgatgccgatctgtctcgtttccttgagcaagcacaggcatcttcgctgtatgaagtggttaaaaacaccttgtaagtactaacttatcaatatatattgaaannnnnnnnngatctattgtctatttctatccttatcaatctttattttcgataaagttgagcgttggtggccccgtggccaccatttttttacttaatttctagcctggatgtcttctctgtgtttaaaatgataggtatgtacttacttattatttgaggtcatcttgtcttttttacttaatcgagaattcagtaacggtcagctggcttcgagctcttatggccgtgtcattcagaccgttgttgataccggcgttccttccgaagatcgcaccggcaccggtacgcttggcgtttcttatgtgccttcctactacatgcttaccggcggggctgttccgctcatttcttcaaaacaggtaaaccttaaaccgctactggttgagcttgaatggtatttacaaggttcaggcaacattgggttccttaaagagcatggtgtgaagatctgggatgcttgggccgacgataatggcgatttagggcctgtatatggcaagcagtggcgccgatgggaggacaccaggattgtcccttacagcgagtatcgccttaaggaggacatcttcatggaacgtggttatcgcgttgaaggttacattgggctgaatgaagaccgcgtcgttatcacccgtgaaatcgatcagttacaacgtatggttgatcagttgcgcaacaacccgaccgatcgccgcatcctgcttaatgcctggaatgttggtgagctggaggatatgaagcttccaccttgccactttgtgttatccgtatggagtcgtgagctcgatttccagacccgtttgtctatggccaccgatattggcatccagcataaccggcatggctatgaatcgatctatacccagatgctttgcctgatagagcagcgaggcagtatctctgagccaatgctggatgagcttggtatccctaaacgtatcctgaactcctgcctggtgcagcggagtgtcgatactttccttggtatgccattcaatattgccggttacggcatcctcacgcagttcattgcgaagattacgggtcacatggctggcgccttcgtccatttcggctttgatgttcacatttacaacaaccacttggagcaggttgaagagctactggctcgcgaacatccggagtcgtccgaccccatcgtcgtcttcccgcacgaatgggaagagctggatgacttcaaatgggacggcgtgcagatcttcggctacgaaccacttccatggattaaggctccagtggcggtgtgatatggccagaggcatgtatgtgttatgtgaaattgaagatgtgctggcgagagccggccatcgtcaagccgctgctgatgaaaacgcagacactctcgttgcaggtgatgagctcatattccccaccagccgcatgttgcgtggctttgctcgctccggtgctgaagtggtgcttatcagccaccgtccggaagcgctcgaaagcgcaaccaaaaaatggctgagagatttcggcattgattatgactggctgcacctggcaccacgtggagtcaattacgaaacccatataaagcgcacgcttgccgcgcataaagatgatctgatgatcgcggcactggtgagttcatcacgtctacgagctgctctgtctggttttcaccagcgcccggtaatgtatgaggtgtctcaatgaagatgattgcagctgtcggtcgcaattatgaaatcggcattggcaacgaacttccctggcgttgcccgaccgatctgaaactgttcaaacaactcaccaaaaacgccactgtcgtgatgggacgtaagacgatggaaagtcttaaacgcccgctgccagagcgccataacctcgttttgacgcgctctcgtggctatatccccaatgggttctaccccgctggcatcgatgacgttttgagactaccagatccggtctgggtgattggtggcgggcagatttactcgctctttatgccacacgtagaagagatatggctgtcgcatattggcgtggatgtgccgggcgcggatgcgttcttcccggcgccaatgatgcgttctttagggttcgtaccagtcgaaacggcttatacccaacgtgcaaatgaggatgagcttggctttttgcagatcgtatacagaaggtcgtaatggattaccggattggaatcactggcgcacagggcagtggaaaaacaaccctggcaaggtacatcgatgcgcattatggcattccgtatgtggatgccggcgttggcaagctgatgagcagtctgggggtgaaggttggcgagcgtttgcccctttacgaacgtcttcaggttcagatggagattgccagacatatcgagatgatcacccgcggcgttgaaggttttgttatcgaccgcacgccagccgatgtcatggcttatacgcttgacctggtcggccagaccaatgaagaccgctgcatcgagctggctctcgacattgagcagttttgccacaaagcggccatttccaacttcaatgctatcgcgggtcttcgcccgggcgttgagctttccagcaaagatctcgcgcgtccccagcgaggatcgcttgaccgtctctatgttgctcgcatcgatgcgcttatgtgcggtgagctgacgaaaatcaacacccttccccaaaccggcgatctgcaggtgttcgttatctctgaaaagtgtcgcacggttgaagcgcgagccagatcggtattgcgagtgctggacagagctgctgaaaacatcgagcgccgtataacaggacgagtgaccttccactgaatgttgctcccctgttgggcagtgtgacaataagacacgcgaaatgaatcgaggaaaaacagaatgatagacgaacttcccctctcggatgaattagatcgtaaagcgattgaagcactgatccgcattgctgacgaacaatcccgctctttgatgagtgaacgtgaagcacgtctggctatccgcgcagtgtttgagtccgttcaagggcttgttggggaagaggtaggcgaagccatcaatgtggcgatgtcgcagttcaatggcggcaccaagcgccctctgtttcctatgcacctcaaactctcaggcggcacggttctgttcgtatccgtttgcctggagaccaaccaaatccagatcctcaacacatcaacgggcgaatggcgcgcgccggtcgtctgcgaaagtggcgaggacgcactgaaaaaggctgctcagtttgtgcgtggcgcactgctgaaaggcgcgaagaagctgtaaggagtaccaatgaccacgattgtcggtggcgtagatattgagtccacagggctggacttcacatccggccacaaaattatcgaaatcgcgataacccgttatgaacttgaaacccagaagcacatcgacagccttgagatgcgcttcaatccgcgtcgcagtatcgatccgaaggcgcaggcggtgcatggcatttcactggaagatctggcgacggaaccgctgctggctgaccacgcaggcaagattgctgcgtacatgggcgcatgtagtgcgttagtcgcccacaacggagaggcttttgaccttccgtttattcgccacgagttcggtagctatggggtgaaattgccaaatatccccatcgtagacactatgctagatgggttgtgggctaccgaggatgggaagcgtccacgtctggaagagctggccttttcacttgggttcacttacgaccgtgataaggcccatagtgctctctatgataccgagctgatgatgcagtgtttcttcaaagctcgggaaaaatatggttttttcgacttttaatataattaacggtgcaatttattgcaccgtttaactttttagaatgaaacttttgccttcagtaacttggctgccatttcaaaatcaatttcaccggttttagactcagttgcaagcttgtatagaaccagaacgtatgtatcgcctagaacttttgtgattgcacttgccgttgttgcagatattgcccctccaacaaggctccctacaccaggtatcatctttaatagccctgtgacaattgttcgtcctacaaaaactgcaccaccagcacctattaaagacgttaccattgttgttaaggccactttagatacatccattccaaaggtgtaactgatttttgcaatcattgcgacttgaattggcactaaggtaaatgcatctgaaaatgggactggtgttgctgcggccgcagctgcgatggccgttgcggcaataacttctttactggcttgctccttttttatatccaatgctttcttgtttttaattgaaagagcattggaaaatgcctttttttgtgcttctggaataacctcatacgaggtttggatcaaatcatctatgcctctaacctttcttttacctatgatctcatccggttcatcttcatcataaattgtttcttcaatagcacgagtcagacatacggaatggctatagtttttaaatgcgacctcaacctctttcgcaaattcattgtttgtgaaattatttgtttttgttagtactactatgactggtatccctttgtttatcaggaatttagctatatccaattccgcattttcataacgtttaccggtgtcattaatacatagccaagcgagatggacataattctctgatttttcactattgttatgttcatttatatagttttcaatttttaatctggttttctcgtaatccgcaacttcaagtccctgagtatcaatgatttgtaatgggacgccttctttcttaattacatttatattttctgttacggggcgccctactccagttctcgcaaagtctccacgaaatacactattaatgagagaacttttccctacaccagtctttcctatcacgatgatgttagctacgggcatatctttgactgcatcgtttaaaatggcatttacatcaatgttcacattaatcactcctttagcagaagcctttcatcatagctgatgcttttaaatttggaaaaacatatgagctttgtagggaaaaaaatcttcaaaagcgtgagataaatctcctgtaatgacctgaatttacttgttttctgcctgataggttttgtcagaatacgctcaaccaaaacgcggaaacgcaccaacgaaaacataaggagttaaaaatgagcgcagttaccaacaatgttaaaaacgatgacctggatgaactgactgcgatgctgcaatctctcgacgaaccagttcagaacgctgcgaaaatgagcggtgtcgacgagatcgacgatcttctctctggtctggatgatgcaatcgcaaaaccagtcgaggcggtggcggatgaagtaatgaatgccagctctaccggggatctgagtagcgtgctggaagagcttgagattgagcacgaatcggtgaagatcgaagaacccgagcgtgacctgattgcggagattgtgaacgagccagcgcctgaacttgacgctcgaagtactgagactaccggtacagatccaactcctttaccttcagtggcgtcagagcctaaacctgaagaagagcagccaaaacgccagaaggcaaaatcagagcgtgcgccggccaaacctcgcttcacgctggaaggtaaggacgaatcgttctatgcgtcagccggtctggaaagtgagagctttactgctgcattcgaaggggcgccagtcaaagcgaaagacaagatcttgaacctgttgaactggtttaacggtgggccggaaatcagtgtctacacggtaatcgcaatgcgctatatccttgacgcgaacacggtgaccagcaatagcattaaactggcgctgatgagcaacccggagaaaccatacccgctcaacactgcttcgactcaggctggccagatgatggctgtgtttccagcgactggcatcgcaaccagagaaggtgggaatttaacacttaataaagagtcgccgatcgtaaaaaaatttatagcggagtattccattggatgatgtcccccaactcgatttaaagccatctgatagcttaaagatgctgggtgagcatatttcatatccagcatcgaaaaaacgcgccagagagcttcccttttgcgattctggcgcgttcttctttgtttgctatccgttggattaaatgaaaaaataggtaagtatttatctattagagaaaagcaatgatcgcagccgaaaaaatcaaaaagcgagagcgtgatgcctctcttcgcgacctttggcgcacaccgcagtggttgtttgtcgccatccaacgttacataggcgtaaagttcgatgtggacgtcgcctgcaacaaagataatgttctcttgccgaactttatcggtgttgagcgtgatgcgctcaagtgcagctggggagaacctggcacagtggcgttccttaacccgccctactccagaatcaacccctggatagacgcagcaattcgcgagcaggcgcgcggagtgacgacagtcatgctgataccacaatccctcgatacgtagtggtgcgagcgtgcggctgaatgcgccaacgaaaccatcatcttgtctggcggccgcgtggcgttcatggaacctgacgtcacattgggtctggttgaggtcaatatcaacccaggcggaagtatgctggtggtcttccgcggattctgtcagaacgttggtcacttcatgaataaagtcccgctgacggtgatgaaaagtctgggtggttacgatcctgccaaagtgatcaggaaaaaaagaccacggaaacaggctgcttaatccgagtctgggagcgtttcataacctgctttcgtatatataaataactaagtactaattataaacatatacgaaagcaggcttttccttgtcgatttcaaaccactcccagaccgaaacaagacgcccagaccactctggaacccctttccagaagctatagaatcgtttttgtgaacacaagtaaggaaaccatcatggcatacccgaccaacgttgtagcgctcgttgagagcgattttttggctaacgctcgcgaactcatgaaggatcgtgaaaaggcattcagtctttacgagtggtcactgaaatgtttgcacactggcgaacacaaagacctgattgagcagctccttggcgagctaatcaacgaggtttttgctctgcaagttcagcttcatggtagacaaaatgatcagtcaaaaaagtaagtaagtagttaccgtttacgatgtatcatagtggttgtagaatgatgtcgatttcgacctgaatcgaaatctcggtctggtgggtggaggatagcgtcactggcaccagacttaaaaaagcccacaaccagcgcagaaccagcccttttggggtttggggaaggggaaccaaagtgggcagagagaagggtcactttatgattgtcgagtctgggtattttgagaggttgaatccagtactccccttcatgaagtgtgggaagatctcggttctggggtgctgtcatccataacttcccaagcctaagctggcagtagacttaggtcataacttttcaggttatgaaacgaccaggttggtgaggattttttactcacctccctgggagagtattacctgaaaagacaacctctcacttcgttcgaggtgaacttcactcacttcgttcgctcagttcaggtaaaaataaacccgatctgggaagtaattcattgaaaataaatatgtataaacacgcgtgcgcacacgcgcgaggaaaaacgggcggcggcgcacgctttggagttagagatgacgacaagcacacacgccagacgaaaaacggcagccggccgtgcgcagcaccagtatcaaaaacacccccgcaaaaacttcaaaacgccagttgtcgaatttaatccccggtttaagacggtcaaagttttcagtgatggctcttgtctcagaaacccaggcgggcccggtggatatggcatcgtctttcagttccgcggcgaagaacgcgagttttccgacggcttccacagcaccacaaacaatcgcatggagatgatgggcgccctgatagctttggaacgccttaaattctcctgcaacgtgatcctgcactcagatagccagtatctcaaaaatggtatgaccctctggatgaaggggtggaaacaaaatggttggatcactgctgacaagaagcctgttaagaatgtcgacctctggaaacgactcgatttagccgccagtcgccacaatgtccggtggaactgggtaaagggtcacgccgggcatcgagaaaacgaaatatgtgacaggctggccaagatcgcagcatatgcggcagctgatactccacacaaaaaagatgctggtttttggtataaaatgataagtaagtatttacctataattttgtatcatgtatcttacccatcgtcaggatgacaacgtgctggttaggcacggttccaaggatggaacgcaaaaaacggcggctggacattccagccgcaactctttctgacattgaaaggatttcaaatggcacatcaaacgccttcctcttctcttaagaaacacccccgttcgctacgactcatcctggcggagttattctccggccgtgtgtctgcacgcctgtccgaactggaagagaaagtaggtcaaatggagcatcgtctggatgaccatgcggtggccatctctaacctgggggctcgtgtggcaatgggggaagtgatgaagacccgaaccgcaaaaatcctgcgagacacctggggcgtgcgagccaatcaaacgcgcatggagagctcagatggatcaatttcaacgaaaaagactacttccaatggcctacgggctgatcacgatttgtctggcagccgtagcaataccgtcgactcaggcgttgctgatgccggactcatgcaaaacggtttcgcagcagacgccggcaccagtcacggaaagcacaaccagcatcaccaccatgccccggtctgccactctggatgggatgcggttggattcgattcctcaagttcgtcctgcgactccggatcttcctcctgctgcgactgaggtgatggcgtgatcttcttactcaaaaactggtcattcatttggatagccattctgcttttggcggtgggtggctggatctcaaacatcgttaagctggcactacacggtgatttatttcttcactcaggtatgacgatcgctcgtgttgtggggatttttgtcccaccgatcggctctgttctcgggttctgttaatgggcgtaggggttgaagccttggaggctctctttgctgccttaatgtttatttgtatacgaaaacaatttgtntaagcacataacatatagggaaaaacacatgttaggtttcttcaaaaagaaaactcgtaaagcggttattgaagttaaaaaaatggagaaccgcgatgcggtcgaagctactgtctggggcgcatacatgatcgcttatgcagacggcaactgtgatgcaaaagaaatcgctattctggagaagaccatctccgcattgccagctttctcaccgttcgcgggtgagatcgcccagatgagcagcaatattcgtgctcgctatgaagcttctcctcgttccgccaacgcacaggctcttcgggagctggctgatgtcgccggcactccagaagccgttgatgtgttgtgtctctgcctggatattgccgatcaggatggcatcggcgaagaagaagaggttgtgctgaagaaaattgctcaggcgctgcagttatctctggatgcgtacatctaatggcagagaaattaaggctggccgtcgtcgccattcttctcgtgctggtcgtgctggtggacttcactggcaaactgatgtctatcgcggcagatggcgtgttggttggattggctatctactttgcccaacctctacttaaaaaatcgaagtgatcgccgagggccacctggccctcgattcttctggtttaaccgttatgacgcgtttgcccccctcttctgaattgtcagaataaagcaatcaagaaaacaaattattttaacaattaaggaaaaacacatgtgtgataaatgcaccgccgctaacgctgaagtaaagaagatcattaatgaagtcggggctaaaaaactcgtagggatgcttgattctataactggtcatggtgacgctcatccgctggaacgcatcatggccatcgtccaggtcatggacttatttgacgaaccaatgaaaatcctgatgcttgctcgtcactttggcggggcgtatgtggaagagcatgaacgtgccaataaactgcaggcaactctggacatgatgagcgaaccaaaatgcgcgccggcgccagagctctccggagacaatatgggcattgaaagcaaagagcgggagatcgccagccttaagtcttctttaggcatgttaattaccgcctttaaactaatggcaacccataacggtttcaaaatgccagagctaaccggcgatgaacatcccgctgctattcgccagctgcttggtgtgatggcggataatatggatgaagcgaagagccgtatcgaagacatgatgcgagaacttgcccaccgccacgatctaaatgaccagccgcacaagatgcagcaagtcagccactgaacctgaaatagcaaggggcgaaagcccccttcccctcctccgtagccctctggatagatctttaacgccttttcttatctaagataataaaaccaataataaaacaaattgtttatatggtgggattatgagtgctgcgctttctgtccttgagtcttttgcttcgaacaccggtatcgaccacagcaaagagatgaacgtcatccatgcaatcgtggccgagtgcgagaaagggatcgcgttcatgcaccaggttcacgacttcacttatggcgacgaacgtcactggaataagtgtttaagatttgcactacgtacattggaagtggaaattatttggtagggatataagatcatatccctaagctcttttaagaaaaaattgcttaataacctaatgtaatttaaatccttcctccaacccctttaaatttttcgataaacgccccaattttttggaatacggtctgctttttcgttttgtactgaggattcagcggactgagttttggtagcgtctcatttaactccgtcccattttcggtagcatattcccgtttgagtgatgtacggatatagcgccttgccgcctcttcattgaggttttcttccttaatcaacgcttccgcttcccgttgctgttcacgctgagcataggtaaagaatgcatcaatgatactggccttatccggcatgtcatcaaggttagtttgctgaataaagtcaacaatcagaccttctttggcacggttgcccagacttgagcggattaagcgtcggacctcttcagtcagggcttctttaccctttttctgacggttgtggtcaaaaatcaggcccagaatgtagtccaggttaatctcttgcgacttgagcaggtcaatttcaaacaccacgtcatcccagtccgtggttgatgtatccctgtcgtttgctgctttttcacgtcgctgccagtcccggatatcattgtaagctgagcggtagtcctgaactttacgttcggcagggaggcgaatggtttgtaattcagcaaatttttcatcatccacgtagtgctctgctttaaaggtttctaccgcttccgggtcactaatatcaaccttctgcagggctttcagcgtggcaaattcatcgtagttttgcaggatgttttctgcccgcagatattcaccaaacagtttgacgaaggcttttttctctttttcactgtcgatactggcagggtcagggaagcgctgctccagctccgaaacaatagacataaaacctcgtttagcttcgccggttgccgcatcgctaaagccctgcatgtactcttcgtagcttttttccagtaccacattcttggtgtttttgtcgccaaaaagtgtaatggcatcaatggtgggacgctccaggtccctgaaagtcacgatattgccgaaggttttggttgcatcatagatacggttggtgcgggaaaatgcctgcatcaggccgtgataacgcaggtttttgtcaacgaacagagtgttaagcgtcggggcatcaaagccggttaagaacattcccaccacgatgagaaggtcaatatcctgatttttcactcgttgagctaaatcgcggtagtagttctggaagccgttactgtcggtactgaaattggttttaaagtggttgttatagtcatcaatagctgaatccaggaattcctttgcgctgctgttcatcgcgctggtatcaaagctttcgtcagtaatatcaccaatggcgctttgctcttcatttgcagcaaaggagaagatggttgcaacccgaaggcgtttatagctgcctgatttttttgctgcttcttcctgtagcattttaaacgtcgagtaataagcttttgccgcttccacactgctaactgctaacatggcgttaaagcccttagctcccgggaaggttcggtgcgttttctgacggaagttattgataatgtattgcgttatttcctggatacgtagtgggtgcaaaaatgcctgttggttttcagccgcgctgagttttttctcatcagtttccgtttcaagagacttaaaccgtgggcggacatcgttatagtccaccttaaacttcagcaccttttcatcacgaatcgcatcagtaatgacgtaagaatgtaattcacgcccgaagacgctggcggtggtttctgcccccagtgcattttccgggaaaataggcgtaccagtaaaaccaaactgataaaagcgtctgaatttctttttgaggtttttctgggcctcaccaaactggctgcggtgacactcatcaaagataaacaccacctgctgctgatagacgggcaggtcagcttcggctttcatcaggttattgagtttctgaatggttgtgacgataattttgttatcgtccttatccaggtttcttctgaggcctgctgtattatccgaaccattgacactgtccggagagaagcgctgatactccttcatggtctggtaatcgaggtctttcctgtcgaccacgaagaagactttatcaataaagtccagctccgtagccagtcgtgcagccttaaagctggtcagggttttgcctgacccggtggtatgccagataaatccaccgctttcgggttttgaccagttcttcgctttaaaagagctgttgattttccagagaatgcgctcagtggctgctatctgatagggacgcatggcgagcagagtctggctgctgtcaaacacgctgtaattaaacagaacattcagcagggtatgcttctggaagaaagtggcggtaaagtccttcaggtccttaatcaaggtgttatccgatttcgcccagttcatggtgaaatcaaagctgtttttatcccgtttagtggtactggcaaagtaccgggtatcagtcccgttggaaatcacgaagagttgcaggtatttaaacagggagttatcgctgttaaagctttccttgctgtaacggtgtatctggttaaaggcttcacgaatcgccacgccacgctttttgagttcgatttgcaccagcggcaggccgttgaccagaactgttacatcataacggttagcgtgtgagccggtctgttcaaactgctgaatgacctgcaccttgttgcgcagcaggttctttttatctatcagatagatgttttccagacgaccgtcatcaaacgtgaaatcacagatatagtcgatatggattttacgggttttgtccaggctgctgtcactagggctgtccagatactgctctgcgaagcgccgccattcactttcgttaaacaccacaccattaagatgctgaagctggtcccgcacattcgccagcatcgcagtccgtgactttacagagataaactcataaccctgattaagaaggtcctgaatcagctcccgctcaaggtccgattcgctttggtagctgtcgccagcatcctgaactttggagtatttatcaaggacgataaagttattggattcagcaatggtatgtatctgttgtgtcatggtgcatcctgtgcgtcgtctggcaaagtccggaagggtatcagaagcatcttccggcattcataaaacctgataccgggcgggtgagaacaaaccctgccggtatcaatggtccgtcagttgctggcggtttctggtttcgggaagctgaacagtaaatcacgatagtactcgtactgtttctggcgcagctcgatttcgcgccggaggccttctgtgattgaacccgtcaatgtgtcaaatttgtccagcattttagcaatatatttctgacgctctatggaaggcactaataatttcaattcctgcaatttccccacagcaagacccggctgtgcagatttcgacgcatattgatttagattcattgttgttaacatatgaaatgcccagtcaatatcaatcccctgcatggctgagactacaactgcatgttctgtagcgtagaactgacctttcattctttggacattgccacacagagcaccttgtcgccctattaatagatgttccccatcatgacttttttctttaacgtaaccacgaataccgtttccgccaaaacaaggatatacaaaatctccttctttcccatctactatatttctcgccgaaatatgctgccctgcacgcatcttcacaatctcacccaatgtcttccactcaaccccaccctcttcaaaactcagcaactggtcacgatagtaattgtactgctttttgcgcatggtaagctcagcggtaagctcagcggtaagctcagcggtaagcgcagtaaatttatcaagaatccggacgatttcagcttggatagcaagggacttttccggattttcggggctaataacaggaatcaaaacttttttgaatcgagactttgatatgttgaaacgagttacaccgcttgcggttttagctatctccgcacgcattaaattggttctgaaaaggtattttgagaattctggtttgattttaaccttttgattgaaccgaataccgaatgaaaaactatttaaataaacgggctcatcaaaacgagatgtgattgcggacgaaatgccagcttcctcagcagtttcagatgagccagtaaaaagcacatcaccatacctaacagcgtgctgttgctcaccatttttgacattaacaaaatctgttggtggttcatcaatatttatattgctaaatatatttttgtatgaaacatatttcgcattgccattttcaaaatcagccttggtcttgccggtaagtccaccataaatatcagcaatttctccaatcggcaaccactcaatttcaaccccatccagtaacttttccagataactcagctcactcatttctgcacctcgtcaccttcaatctcagccacaattgtatcaatgtctttacgtaactgatcgattttgctgacggtggtttttagctcgacattcagctctgcaatatcgacaatttcgcgggtattcaaggcttcgacgtagctgctgacagacaggttgtaatcattcccagccactttctcgaaggctacagatttcgccagatggtcaacatctgctttgctggcaaagacctgcataatcttttcgatatgatcatcagtcaggatattgttattggtttctttcttaaacaacccgctggcgtcaataaattgcacgcgggtatctgttttgtgcttggacagcaccagaatgttaacagcaatagtggtgccgaagaacaggtttggtgccagagaaatcaccgtttcaacatagttgttgtcgaccaggtactggcggattttctgctctgctccgccacggtagaaaataccggggaagcaaactattgctgcacgtcccttagcagacaggtagttaagcgcatgaagcacgaacgcaaagtcagcttttgattttggtgccagcacacctgccggagcgaaacgctcatcgttaatcagggtcgggtcgtcactgccaatccacttaactgagtacggtgggttagagacgatcgcgtcaaacggtttttcatcgcaaaagtgaggctcagtcagggtattccccagtctgatatcaaatttgtcgtagttgatattgtgcagaaacatgttcatacgcgccaggttgaacgtcgtatggttgatttcctgaccaaaaaagccttcttcgatgatgtggttatcaaaatgttttttcgcctgcagcagcagtgagcccgagcctgcagcagggtcatagattttgttgacgtgagtctgaccgtgcatcgcaagctgagcaatcaacttagagacatgctgtggcgtgaagaactctccgccagacttaccggcattcgccgcatagttagaaatcaggaactcgtaggcatcaccaaacagatcaatctggtgctcgttaaaattccccagcttcagcccctccacgcctttcagaacggcggcaagacggctgtttttatcttttacggtgttccccagtcgattgctggtcgtatcgaaatcggcgaacaggcctttgatgtcggcctcggacggatagccgtaggcagagctttcaatagcaacgaagatactgtttaaatcagcattcagcctgtcgttggtgttagctttagcggcaacgttgcagaacagctggctcgggtagatgaaatagcctttagtcctgatggcatcgtctttgatgtcatcggtaatgatgctgtcatcaagtgcagcataatgtatgctctcatcccctgcttccatgtagctggaaaaattctcactaatgaagcgatagaaaagtgcaccgagtacatactgtttaaaatcccatccatccactgagcccctgacatcattggctatggcccagatttgacggtgtagctctgcacgctgctgaaggcttgtcatcttgtatcctgttgtatgattcttaagtactgttattggcccgattttatcgcaatttcatattgatgacaggttttgtatgtcatgcgttgcactgagagttcgtttgcccggttgtgtagccaacgttctttcagtcaggccagtagaaacgttgcgctgacgataaatactgaagccccgatactatcggggctgagcgttcagtcggtgagaatttcttcatccgtatctattgtggatggtgatgaatctatttttgttgtaagaaatacccgattcagtagtctttgctttagggcgtttcttcgctcattgtagaattcctggaagcgactaaactcaatgttttcatctgaaactaacagcattgatggagtatagttgtttgatgagtgagatagccattgtttcagggatgtattctgtttacttgtattctgagagtgattcagtaaatgaagatttggtatggtgtcccagtgttccggattttcgtaaaagctgagtttctccggtgaattcgcaatataatctaatttttcaagatatttatttgaaaaatgatttcttggatgaaggtgatcaatatgaaacacctcggtcggattcatttcagggaacagaagatgcaatagtgcgcggcagcgaccttcgccatatctgatattgagaaggctttcgatgtattcgttgtcaaatctgaggtccttattcgagcctttgtacctgtcaataatcttctcaagaggaaaatgaacatctgaaagactattcttcattacgtctctgatgctcgtgagtagcgcatctgcctggcttccaaagatccctttcagaagtaccatgtaaaaccactggctaattactgagcgttcattgtggtttttattcaggagattaatcgttgtatataatgggtgtccattggtttgctttttgtaaagccagtagaccacaggaatgactgcatttttagatatcagtgactgtggattgatgccgaatcgcctgataagaacaaaagtctccttgatacaggattttatttcagaccattgttgttgtatcttaccgacctcttctgaagtgaaattttttactttgaaccggacgtcagagtcaataagcatcaggctggtttttaagaaccagtctctttcaatataaaaccccatttcattattctgatgaatgttttttgttagttcatccagttctcttctgaaatcaccctgccagtgtgctacagctattgacatcagtaagtcggagaactcaagttttgtcccccgctattcgtgcggatgaaaacatccaacacatgatcaatgtcctggctgctctcattgaagtagtggataagactctcagttcttatcttggtataaagtttaagcagggtttttctggagaattcactggaaatgagtcctcttttttcgagttctggtacgacaactttaaataagatatcatccggagaatcaatttgctcgtatttgaatatttcgtgaaggcagaaccagtgatgtttgttatcggtaagtgaatcagtgtattccttgtcggtgaggaacctgaagttgtacttcatcatgggctcatcgtctgagtcaagtggcgctgttaaatcgacgtaaagctttctgggcggcaggaagcgatcatcctgtgccgaaggccaccacacccggggctttttatacgcatacgttccacacagtccaatatataaagatgtgagacgctgctgaccatcaatcaccgccttaaaatcatgaaatcccgcatttgttggtacacatgggttttcttcattaaatcgctgacagtattctttcaggaattcatagaatttgtaatcgtttttaatactggcactacggatatcccacatcatgaaagagtttatcgggtagtctcgcatgatggaatcaaatagtagacatatctgcctgtaactccagacaaactttcgctgaattgcaggcagaaggtagtggcgtaaattaatcgaatctatcgcttgttttatcgttattgctttttcatactggccagccatcataaacctcatgtgttatattagctggctgattttaatctaaagggtgtaacgagtacagtatttgcacaagcataatttatgcagtggaaaagctgactgctcggtttgtgtttttcgttcgggtagactcgcattgcggacgcacaaagtgatgaaacctgtcttgctatgtttttaccaaagttaacaagaagtccatgctttatcttctcgccatctgttatgtctgccaggtcattaccaaacgttacgctggcagctttgtgacgcgtgatttggggggggatgaagcgtggctacgcgtacagactcccaggcgacagactaattaacgcgttgacattggcggtcactaattgaggatttctataagaactcgttgatcgccctcttccctactctccaacttcatacactccaggcgtggcaaggcttttacgcacattacacccacaagaaaacaaataaataacacatcaatgaaaagtcaacgctttaccctgatttggtctcaaaagttgacgttttgccatgtcacttcttatatccgttaagaagcgtaccagaaaccaacaccctgcgacgaaaacgccaaaaacgactcctgatagcaccacaaaacagacacgctaagaatggctctcgttgcgtttaatgagtatataaacaaattgttttaagcaataagaaaacaacaaaacaagataacgaagaaaaggaactgccattaccccacacccaggcaatacccacctcttcctgccaggctaccgaaaagaccaacctcattgccccaggctaccgaccccatgaagaaaatctcgaccaccaccaaaaagcgacgagacaaaggcaatttctctgaaggccattccccaatacacggaagagaatacccgggaagaaactccagacaagaccaggccagaacagtccccggcgccatctcgtttacccactcttacctcgaaagataacgcaaattcctgataagcagagaacgccattacttcacatgcggagaacgacaacagaccagaacccacatcacccacacttccacctctcaagatgaacgaaagaaattgcgcacacgccattactccatacccagagaagaactatccccacaacgaagaatacagaccagaggaaaaccacaagacaaccacctctacaacatctgcaaaaccacttaccggcagagagaagaaagtcgccttttctcccatacgaatggtcaccgtatagagcgctaataagagagatacgagtcccccataagagaggttgttcgagtcaggaaagagcacagatataagacagaggggatggagggggatcgctccctttcccgtatttattcaagtcctgattttatcccccgtaacatccctgcggtcgaacgagtgaaagggccaccgcgaaaatctatcgggagcgtccccgcagggggaaggctggctgcctgagtggaaacggctgggttcccgtcatggaaagggtgcgtgccggtatagagacaaaatgccgcggggacggctgatttcctggcggtacaccgtttggtgcgcggttggctttcttcccgctgcgcgcagctgctgatacgtattctgccagagcgttcgagggtcacaagctgtttcagtaggttttcgggaagaggaaaatactacccacaagccctgcggtgcacgttgagaagaataatgtaaaaagtgctcccgatacgttcccggatactcactgcttttccagcgcttcccgatacaaaatgctttttcgcctatgtcttattgcgataataacaccatcaagaaaacaacgtgtttagacaaaggagaaacacatgtacaagcatttgaacatcagcatcaccctttgcggagaagagacgtgtactgacgaactccagatctctctggatgacgttatccgctctgcggatgtcgctgggcgcattggtacgctgattggcgaagggtatcgcgagggcacgtttgattttcatatcgaggacaacgcaatgtccgtcgcgtggaactgcacaacgtcagagtccagataaaggaggaagacaatgaatatgcctgtgattgtggaagtatggagcgtggactcgctggccgaatgtcttgatggcgtagggccagcactgacccgtaaattatggtcatttgtaccagctaagggagagtcacccaaagggaaggatgtttggcacctgctgactgatgaagagaagcgggagctggtggccgcagtgaaagaggagttccctgacgaagattaacaacggccaccagcaggtggcttttgagtgattgtggcctgcggccagctgaatgccggaacgcttcgcttggtggccgtttacacactggtattatttacaccaacaagaaaacaagttgtttacggagtgtgtaatgaataccgagatgattttgaaactggataagctccagcctcgcaaagacaaacctgcagtactcggttcgatcactttactggacatagtggccaacggcacagccatccgacttttcaaagagaccgttgtcgtcttcggcgaaacttctcgcaagcgcatcgtaatgagcgtcaggcgctatagtgcgaaagggtgggtagctaaacaagttatctggcctgagtcagaactggagttggctttactggaagttaacaaggtcgcccagcaggaaattcaacgagcaacaaccctcgccatagcatagtcatgtgcaacacagattagtcgaatttacgacagccccgttgatccttcggggcttttttgtattgtaagtacttacctacggcgatagtattacgacgcatttacatggaggtaaaaatgagtttgaccaaagaagatttagtatttgacctttactacgcatccagcactgacgaagaaggcaataaactggcccagctgaccgttcagttccgtgatgcatcggctgttccgcatgtgaccacccagctggcccgcacaactcttaagcgagatcgctcgaaggtttatgccgtcggcgagcaatccgtgaaaaatggttcggacactctgctggccgccattgaagcctattatcgaacagacccgaagaccattttcgaaaacctgatggcacaggttcaggatatgatcgagggcaatctgggcgccaacaatacctgggttggttcatacggcataaccattgtgtctggcggctctctggaagagtatctgcctgagtccgtctacaacgtccagtaaaccagccaatggcgcgtaacccgcgccattttccccatcccgtaaacaagttgttttatacattttctgagttgcgataataacaccaacaagaaaacaagttattaacgaagttgaggaaatgttcatgggacttgatatctatattgagacgcagccaaaaaacgatctgaataacgaggcatccagaaagcaagttggctacttccgtaagttcaatgctctcgttgggtggatgaaccgcaacgtaggtgaagttgtaaattgtgaacttttagaagttacgatgaatgatatttgtgctctcaaggctgatttgattcgtctaaacgaaagtaattgtgaagaatatctgcctacccaggaagggtttttcttcggtagtcaggagtacgatgaagggtactggaatgacgtggaagagctgaaagagcttgtggatgagctgattaaaaatcacgacttctacaataacagactgacattttgcgcctggtggtaaatatgactgatttcaccatctccccgaaagcagaaaacgtatggctggaatcctggcttgacctgtcgccggccgagcaaaaagaaatggatcacgtcgaaccggacgaacaaaccagctcccgcttcttccattatcaggatagcgtttatgacattgccgatttcatgcgcgatgaccgcttcccggaatggaacgccggctatccactgaatgccttcgctatgttgatgatccgcttaactgattcaggcgacaccatcgacatcggattgcttcattgagagaggagggccaccgatgctggtggctcttaactaccacctgctttcccgcaggctaaaaacacccacctcttaccgccaggctaccgaagcacccaccgacttcccgacggccaccagctgccgaaacagaacgcttggacgcctcacacccactgcgataattaaaccaacgagaaaacaagttgtttaaaggattatcacaatgaactatatcgccactgtaaacactcccgcgcatggcaccatctctgttacatactccgatattgaaaagaacatcctgggcgcctggcgcgaagaagagaccatccagctgtccggaaaagagaagcagcagatcgccaacgacatcatttgcaaccgtcgattcacgcgtgtcttcgaaaaagcttatgtcaccacctcaggattcggggtgtttatcttcccggttcgaagcgggcggttctgtcagtcaaaactcatcgagctcgcaacacagattgctgtgtggatcaaaacagagtcagggttcgactttacagaccaggaagcaacagcgcagggtgtgcggatcgccgacaatgctcttaagtgcaaaaacgtcatttacgaagccggtatcgactcgtggaaggtcacttgcggggagttcgtgaaagagatgcacgccagtaatcggattcacatactggctggcaagtaagaggggagggggctggaaacgccccctttctttccgtccaccagctcccgcagggaaattcagaaacgggcagaaagccatccgggcaaccgacgggaaacggccagaaaattttcgggaaacggcgggggtcgcctcatgggaaaaatttgtatagagggagacgccagaatcgtcgccagctggtggacgtaagctgtttttgcgccatacgtccagcgctgtgatctgcgctgcattgttagcgcgtacacgttgcgccaacgtgctaatgatacgtgagcgcccacggatcgcgccaatattgccgacacgccccgaaggatagcgcggatcgcgtcaccagacgatcacgcccacgacacgacaaaataagccacgcgctaaaacgcttttaaacgcgctataacgtgttttttactgtgtgtaatgggtatgtactaccacacgtaaaaacacgttaaattggcgcgtttatggcgcttatttttggtgtgaatgagtgaacgccagataaaagaaaacgcgccaacaatggcgcgttatggtggagatcctgaaacgaaaaaagcgcccatagtgggcgctggtggctaaatgctgttttgcaactttccgatcatttcagacaagcgcaaatattctcttttccgtttacagtctcgcttgctgttaagcaaatcagagaacgtaaagtttagcgcgtcacgttgggcgcttaattcgtcgatgagttcaagtttataagcgcgatatttagcgcgatactccgcgcggatctggtcatagttaatcatgatttttatccttaaaactagcgcccactatgggcgctgaatccgtctacttatgctttgaaagcgtcagccagatagttataaaaatcatttttgataaagcgatattgctgcgatccgtttttggcagcgcccattcctttaatcttctcgaccagtcccagacgttcacacagattgatcagctggttggcttgcgtatatcctgcatctaacttaatttcatttgcttgttttgcttcattcatcaaatcgaaaacagcaccatttgtgaacgtgtcgatctcatcgttaatcatatcgattaaagcgaatacacgagatccggacatatcagcgactgaatacacacatttaccagacttgatagacttaaccagataaaccagcttttcgagagagtagctatttgtcatcgcttcgcggaaaaacacttctggcgtttgcttgcttgctttaatcgcgtagtagaagacaccagacaacttatcgtcgtttactgcgtttacaacgttattcacgaagtatgcgagtttagtagacgctgcaagcatgttagctttatctgctttggtgtgcgtgccattctgataatgttcgttgtaagtctgtgtagcttgatctgcttttaattgtaattcgtcagtgataactacagcagcatcaatgatggattttttagaaatggttacgttagacatgattttaatccttatgtaatattgaaaacttattttgtttttcgtctatcgtcagcatgtttgctttcgatgtaagtaattatcgacatgcaaaaaataaaatcaagcgtttttcgcaaggagtgataaaaaatttatttcacaaataaatcaaagtcttagaaataaatcgcgttttctcgaaggtgttgcctaaataaattctacactcggtgtattacnnnnnnnnnnnnnnnnnngacaatactttttgtgatttaatttatcggggagtgacctataaaataataaccggacatagccggctattacccttataggcatttacatcttttttgcatagttcctgatttcttttattatatactccccaaaacgttccgagttttcgcatttgtctttcgaaggctcatcaagccccagcttgcatcccgaaacgatcagtctatcttgatatgcagcgcctaaagccatgcttagctctaacatgcacaaatcgtagtcttccgcctttgaacacacctttgtagagacacgttgagctcgttcaatgctattttcttgagaaaatgcggaagagctaaaaatgaaagttaagaatgttaatgctgctacagttttcacatcaatatcctaaaacggcagaattcgttcaacccaatcaaacaggacgatcatttttcgcccgttcccaacggcaagtgtgacctgacaagcgtcgacgccaagtgacacaccttcaatttcgcggccgtccgccatgtagacccttacagatttatggttctcgtgagcctggcggcaaattttaaagaaatcacggcgggatggccggttatcaacatagtctggatgtacggttacgcgaccaacgaaatcatgggtgacagcgtcatttacacctgactcgatagtgctgattcgctcaagtggcaaccttacacgattgtctttgtcgaacggcgccgggcatagatctaccttgttacgggaggacatcgtcccctgaacgtacatgcagaacacctggccatcttccatcgtgacctttacgggaatttgctccttgcgccagaacatcaacgacgcctctacttttgagtaatcgcgcggccagacctcagcaggtatcccgtaggtgatatcggtaatggtattgggcatattttaaacgcctcatgttatgcgataaaaattaccagaaggtacgagtcaccattatcttctatttccttagttttgacaggcgaaaaagcgttaccttgttgcaaatacttagaattgttatagtttgcaggcaagtttctatatggtgaagaatgatgaataagtgcgcattaatagctttgataacctccagtttactggtggctggatgttcaacccaggcggtcaggacgagtgctgccgacccagtcccagcttcgagaatactgtcgaccaaatacaatacgccgtcagagaatacgcaaaaaatcatcgtgaaacgagactctggcagtaagggcgcgctttgtaccagccggctttctgttgatggtgagccagttgctgatatcaaaacatctgagaaggttgagttaaacctgccttatggcgagcatattctgtctgtagatcagcagggtatgtctattatgtgcggcaagatgaacaccgaaagagaaatcatggtgtcaaaagataagcaagacgaatatcggatcggggtgacggtgtcggcagagctgttcatcatgaaaacagcctataaataaatggtagaggagggcgagagcgtttcacccacgccctccgtaagtacgcgttagagacgtttgaggatatcttccaagtcttccttggtcatcccggagttctcgtagatctgcaacactttctgtctagcgttctcagccgctgccatcgaggtcgcgatcttctcaaactctgctgtgctcatcttggtcagaacaaggttgatgatgtctgacttcgacattttgatgttgcgctctttcaggcgcgttttgaacgaaccaagcttttcgttggctttttcggtgagcttcacctgacatgaaattgagcgattttcggtcataattaatctctttgtaatacaccaaagtcaaaactgctcccgacaggcaacacgccttccgcaaacccgggagtggtgtcaataatgtgttttcgttcgtatgagtgtgacatcaggtgtttgttgcttatatcgataaaatccgaaataaaacacacatttgcctgattcttcttggcacgaaggccgcgaccaacacgttgacgcatttcgacttcggccttgcctcctccggcaagaattacggcgccaacacttggcacatcgacaccgacatccagtatcgtagagccgatcagcacatcaattttccctgtagccaggctgttaagcttagcctgtctggtactctggttggattcaccgtaaataaaatctacccgtaagccgctctctttcatcatttccatcagtatctgaccgtggcgtttgatcctcaccagggtcatacagttcagtccatgatcacggtacatcagcgcgtcgcgaacgacggcctcgttacgtccaatattgtaaacgataccgagctgataagctttctgatacggcgtgctcataccaactctgaagttcagatgcttggaagcgagctccgctcgtatacgagcctcatccggagtgtacgcgattttatggtatacgaagtaaggtttggccaaaatacctcgctcgatcagatatttttcagtgacctttatctcgatgcgtcctgcaaccgccatcagacgcatattggcctcagttgaagccttcataaacggggttgccgtcagcgccaggcgatagtctgcgttaatgcaaagcctggcgatgtcataaaagtttgaaccggaggattcgtgggcttcttcgaggattagcagtgagacgcttgagaggaatcgcttaaccagctcccggcgcttaagatgataaacctttttctccgccggcatatcgcgtggaggctcttcaagaaaactcgccagggtttgcactgttgcgacattgatatggcgagacacctgaaactcaccagaaccaatgatgccaaccttctgacctttaagccacggctctccattctcagctcgatagtcgatcgacttctggaagttatctgccatttgaaacataagaacagagcgggtggttaaaaacagcgtcatgcgtccaatacgcgccgcggctttgcaagctacgttcgactttcccccgcctgtggcgatctgcgcaatcatcattccttcgcgaaccagtgtctctacagcctgatcttgatacgcatagtccggattataggggaaggggttaactgccgggtttggtttaccaagcgccggaaccttgtctttgcgaatatgcacgcatttaatgccagccttcaccagatttgctgctaccgatttagcaaaacccgcggggaaggcatttttgctccagttgaacatagtactggtgcctttccagtcgccagcttcgacttcgtaactcagcatttcctggacgagtcgcttcacgttgtcatcagcgccggagaccatagcgttgaccgcgttcgaaacaatcctaacagtcataaatatctttccttcgtgccttttatatgttaattggctagaatagtaagtaagtaagtacttatgcaatggattgtatcaaaaagtatgggcgtaaaaattaccattctgcaggtagaagtggccagactccggccaaatccctggaacaccaactcggttggtgctcaaaacttcgaaaaactgaaaggctccatcgaaaaactgggttttttcaagccaattctcgcgcgtgagctggacggtggccaatttgagatcctcggcggcgaacatcgctggcgagccgctatggaacagggtatttccacggttcctgttatatcggtgggcaaaataagcgatctggtcgcgaaacaaatgtctctggtcgataacgagcgatacggcgaagacgatcaggtcgcattacagcgtctgatcgaggaaattcagtccgaactcgattatcagctgtcggaaattgccccttacgacgacgaactggcggccacactggctcgtgagtcggcaatcgacctggaaatgcttgaggcgttgtcgcgtggtgacgaagagcccgttgagaaggactctcgtgaaaaagctgagcgtgttggggcggaacaccagactatgcgcttcaaagtgacgtttgacgcttctgatcgcgttaccgaaaccatcaaatccatcatcaaagagcaggcgatcaacaccggcaacgacatggagaatgctggtgaagctctggtatggctggtcgataactacaaggagtgtatttaatgaccaaaacgttcgaaatcgtctaccgagacccggcagagctcattccctatgaaatgaacgccaaaaagcatgacgagcagcagatccgtgacctggccgcagccataaaaaagcgtggttttgaccagccgatcactgtcgataaggacgatgtcatcattactggccacggccgccgcgaagctgcgcttttagcggggctgaaaagtgtgccggtgatcgttcgcgacgatctgtccgatgaagaagtgaaggcgaagcgtctggaggataaccggctggccagcattgattacgatgccatcaagttacagaaagagctggagtctctggtacttggtgacgttgaagtcttcggctttgacgagcgtgagctgaacgtgctggtcggtagcatgaccgaagaaatggatactggcgcactggttatggatctgggggaggaaaccgagcgccagaaagaagagcacaccgaaatcagtcgcgaagtcgccgccgaagaggttcgagtggtcgatgttctgggctttaaaacgctccctgctggctctgcgattgtcgtgggggatttgcttgcccatatggaagaaatcacgggagagagcggggtagacgcgttcgttgcttatgcgcagaaagtttcctccggcggagtcgaagcatgagcacatataccatcaacgtatcgttccagacccgtgtcaacaagactactcgcacgcttgagatcgccgaatcgtttgggcttggcctggatgaaaaagactggacgctttacgacaatcttgagctggaagttgagcagggtgatgtggtttacatcactggccagtcaggttccggaaaatctgtcgtgctgcgtgagttacaacgccagatgaaagaggaagggctttcagtcgcctccattgatgactttacctttgacaacgacgtcaatgtcatcgaccagctgggtaaaaccaccagcgaagcgttagggctgctttcgatggccggcttgaacgatgcctatctctttgtgcgcaaaccttctgaaatgtcggatggccagaaataccgtctcaagatcgccaagcttattgagtcgggcgcgaaggtatgggctgcggatgaatttggcgcagttcttgatcgtgttaccgcccaggttgtggcctcgaacctccagcgtgccgcgcgaaaggtaggtgcgacggtaatggtggcgacgacccacgaagacctgaagaacgcgctgcgcccggatatgcagatcaccaagcactacaaggagcgagtgaaggttgattatgcagattaaaaagactttcccgatttatgagggcccagatctgcgccgccgctggactacagaagccgaatggcgagattggcttcgtgctcatggcgcgtatggttttcgcgttaccccgtatttcaatcgctgctgtgtcgtctttggtgaaagacgttatgtcgagacgataaaacagctctatggcctcgatgaaagcgagttcgtatatggggttggcggcatggtgacaactctgggctatattcaggccgacacgatgcttcattgcgtctacctgccagaaaattacgatgaaacagtctactggcatgaggcactacatgtggcgctgatgaccgcagaatatcacggcgtgcagctccatgatcaggaggcattgacctacctgcagggttatatcgcggaagagttcaatcgttcccgactacagtttatggccgacaagaaagctggtggactgcctgcgatcgagggaatcgtgactcgtccagcatccactatctgccgtggcggtttttgcaatcgtaaggtggtgatgcgatgactgacatcatcattaaacggtatcgcccggaggagttcccgcgccatctggactttcttgagcgcatgaccgtcaccagggggacggtagaagactggcacgcgcttaagtcacttcactacaagacagatgggaagccgttcgcccctacctactatcgttgtgagctagatggtcggttggtaggcgttgtagttatggccttccctaaactgctgctggcgccgcggcatcgcatgtttccaaaactgaaacccacaaccaacaccaccgtggcaaatcagtactggggacgttacgtaaacaataacttcgctgtgatcagccgctctgtagtggacacccagtatcgtggcgtcggggtatcgtatcgcatgattaatctggttagcaggatgcatgaccggccaatcatcgagatccagtcgtcgatgagcaaatataacccgtttgctatgaaagcagggttttgcttcatacgtcctgaacgtccgaagagctacgaaagcgcacttcgcgtctttcagcgccattttcgttctgatcccggcgacaacgaagcgattgtgaaggagctgtttgcgatgactgattcacgccggcgccgcgcactgcgagatctggtggcggactatcacaagaatagttctctggcaaaagcaggccgcaaccgtggcactaccattcaggatatcgcggatagcctggtggatgaggccagcatcgtgaaactgctcaaggatattcacaacctgagcttcacttcaccgctctatggggtttatcgcaaccctgattttggtcgccagctgccagacacactgccactgctggcttttgataaacaaccgctgaatgcaccactggatattgcgttaccggcataaggatttgccatgacactgactgataaacagaaagacatcattaagaccatcaacttaggccatgaacgtggacatttgctcgatctggacgagctgctggaagtgctgccttaccggacgacaaagcagtctatgcaattctccctgcgcgcgctgatcaagaaaggtttggtcgaaaagcacgactgccggccgcgagaggattctggctaccagcgtcgaactctggggctgacgacattaggtcgagccagagccaagttactggtgatgtaagttggtcgggggagtcagattaacagcctgcgtctgtatatataactaataagtcacttattaaatatatatacgaaagcaggctctcaaacggattccccagacctaattaatacaaccagaaaacaaattgtttaagagcgcaaggaagcgctctgtgtgtgttttagagggatctatgactgtcgaaaaagacgagagcaaaactcgcctgactccggctgaatgggcggaagccgaagcgaaatggacttcgggcgagtatacgctctcaaaactggaagaagagtacggcatccgtcgtgaaacgctctccagacacttcaaaaagcgtggattagagaaaggcgccgattctgttggaaagatggtgcgcgagtctctcaagtccgatgcagaactgcgcgctaaagcccgagccgaaaagatagaagaccgccggacacgctatgacggctgggcgtatgcccttggtcagatggtgatggtcgaggtcactacagcaaagcgcgaaggtaagccactggcctcgattgaggacgatcttaaaagcctgcagcgcgccagcggcacgctggctaaatgcttcgaaatttcctccaaggcattgggcatggagaaagaagaaggcggtgaagaggatattccgaaccttgtctttggcgagctaaccccatcacaggtggcccagctgcgcaaggaagatgatgagcccgaagtgattgatgacgatctgttggaatcacttgaagaagaagcgctgagcgaagctgagagcgattttgacgcatcgggcgaagacgatgatggagatgcataaccatgtccatcccgtcgtctctaagtctcgtacagctgcactccgggcagatgcaagtcttccagtcgccacatcgtttcaaagtggtgtgcgccggacgacgttggggtaaatcgaggctgtcgatctcaaccatcattcgcgctgccgctaaggaaagaaaacaacgagtttggtacgtcgcgccgacctatcaaatggcgcgccagattttgtgggatgatctgcaggaagttctgccgcgtaagtggattcggaagaagaacgacaccacgatgaccatcgtgttgaaaaacggttcggagatcgcgcttaaaggcgcggataaaccggatacgcttcgtggtgttgcgctgcatttcgttgtgctcgacgaattccaggatatgaagccagacacctggtacaaggttctccgtccgacattgtcatccacccgcggcggcgcgctgatcatcggtacaccgaaagggttctccgaattccataaactatggactatcgggcagaacaaagagctgcagcgcaaaggtcagtggaaaagctggcagtttgtaaccgctgattcaccattcgttccgacggcagaaatcgaggcagccaagaacgatatggaccctaagtcgttcgctcaggagtacctcgccagcttcgaaaacatgtcagggcgcgtgtattacccgttcgatcgtagcgttcacgttaagccgctgcagttcaatcctaaattaccggtgtgggtaggccaggacttcaacattgatccaatgtcgtcggtcatcctgcagccacaaccgaatggggagctgtgggctgtggatgagcttgtcttgttttcgtcgaatacggcagaagtgtgcgatgagctggagcgtcgcttctggcggtggaaatcgcaggtcacaattttcccagacccggccggcgcctatcgtcagcacgctcgtggggaatcggacatcgacatcttcaaggagaagggctttctgcgtgttgattatccgaaaaagcacccaccgattgctgatcgtgtgaactcagtgaaccgcatgttgatgagcgcctctggcgaaactcgtttgtatatcgaccctaagtgcaaacatctcatcgattcactggagaaagttatctacaaaccaggctctcgcgatatggataagagcggggggattgagcacagcgcggatgccttgggctacccggttcatcgtaggtatcccgtaaaaaatcgtgttattcttggtggttcaagataagtaagtacttacctatcatggaagagaagcaaatggaattgactgagaagcaaattaaggatcttgtggcaagacgccaccccgaatacataaagaaaaaagagcactgggatttcctcgccagcacatacgctggcgggcgtgcctggttcgatgacaacattttccgatacttcaaagaaggtgatcaggagttcaaggagcgtctggaacgcgcctaccgcttcaatcacaccagggaagtggtgaacctgattaataaatatctcttcaaagaggacatccatcgaaatgtagaagaagcgcctgagccaattcagaaattctggaaacgcgcgacacgacagaatgtttccatcgatggctttatgtccgcgcttgacctccagtcctccatctatggccgtgtctgggtggtggtcgatagcacgatggatagtgacgcagaatccgtcgctgacgagaagaagaaggatgttcgcgcctatgcctactggatttctccgcagcagatgttggatatggcgtgggacgatgacggtaatttgatctgggcgctgattgtcgaagtggcgcgcgatgatcaagatccttttacctcatctggccaggaatatcagcgttatcgtctatggacacgtaacgagtggtttctattccgggaagaggttaagaaaggcgccgggaatgccggtcgtcggaccgcaaaagttgtgcttgaagataaaggcgaacacaaacttggcgttgtacctgtgtttcctgttgattgcataggggagagcgaatcgccgtattttagcccgtcgcttattgatgatatcgcctaccttgaccgtgcagtagccaactatctgtcgaaccttgacgccattattcaggatcagacgttcagccagctggccattcctgttcagtcgctcctgccaggcgatgagaatcacgcaaaggtaatggaaatggggacaaaacgcgtcttcacctatgactcggaaagtggcaaccagcctttttatttgtcgccagaccctaagcaagctcagatgatcatcaccactatccagaccgtgattaatgagatctaccactccgttggggtcgctggcgagcgaacaaagcaggataacgctaaggggatcgataattcatccggggccgccaagttatatgactttcagcgggttaatagtctgcttattactaaagccgagcgtcttgagcgggctgaacgccagatgatgtttttggcggcgaagtggatgggggtcgatctcgatgaggagcattcgctgattgcctatccggagagctttgatatccgcggtctgacggatgaatttgccgttgccgagaaacttgggctgctggaagcaccggattctgtgcgtcgatatcagatggaaatgctcattgagaaaatcttcccgaatatttcggccgcgatgcagaaagaatttgagaaagatctcttgaattttccgccaaaaaatgctcttaacacccttgaaaataagtcagtacttacttatcatcgtgatacagtccaagagagcggacaagatctatcccaagggaatgggaactcatcaactcaagcaaccgagtgataagtaattaaaaggaatttttatgaatctgtggcaaatgctaatggcccgtcgtggcctcatggatgtcgccgaatcacatgaacgtggtggcgcaggtgctggagctcccactggtgcagaagagcagggcacccaggaatctggtaagcagaacggcgagcagaaagatcagccgaaaatcgaagacgatgaattcggagggatgactcaggaagagttgctcgctgaattgcgtaagtccaagaaagccggtgctgacctgctgaaagagaacatgaaacgcaaggaaaaagagcgtgccatggccgatcagctggctcagtacggtgatatcgatccggtacgagcacgccagcttcttgaagctgagcaagccgcagaaaacgcacgccgtgaggcggagcaagctgaactggaacgccgtggtgaattcgatgctgtgaaaaagcaaatgatcgaagctcaccaggctgagatggctcaacgtgatgaacgtttttccgctctggagagcgaaaacgccgcacttaaagcccagctggttgaaatgaccgtcggcgcttccttttctggctccaatttcctgcgtgaaaaagttctgatgactccggctaaggcccgcgttatctacggctctcatttcgaagtgggtgaagacggtaacgtcgttggctatgacaagccggcaggtcagaaagagcgtgctgttctggttgacggcgaaggtaagccgttaccgttcgaatccgcgattgagcgtattttacgtgcagatccggaagctgacgctttattgcgcagcgaagctaagcagggtgctggttcaattagtaaaccgacccacaaagtaacccagccgaagaacaagtcgacaatggataagttgactgccggtttagggaaaatcggaatcaagtaacatcttaaatcatagggaaatgaaagatgccattactgcgtgaagaagctgaaaagctgtctaataacgagcttgaacagggcgtgatcgagaccattatcgatcgtgacgacctgtttgccgtcctgcctttcatgaagatcaattcgaaggcatatctttataaccgcgaaaaaaccctgagcgaagctactttcattgatgtgaacgacaccatcaccgaaggtgcagcaaccttcgaagagaaagttgcgaagctgcgcattctggctggcgacgttgacgtcgacaaattcctggctaccactatggctgataccaacaaccagctggctatccaggttcgtcagaaagtcaaaggtctggctcgtgccttccgtcgcaatctgattgttggcgactccaccactaacaacaaagccttcgacggtattccgaagctgatgcatgacgatcagaagatcgacatctccggcgcctccatgactttctccatgttcgacgaactggtcgacgcagttaaagatctgggcgcagactgcatcatgatgcgttctgagcatcttcgcgcatatcgtgcgctgctgcgaactgtaaacgtaggcccgtccgaaatcatgatggaaaacttcggtcgaccaatgttgtgccataacggcgttccgtttatcgtaaacgacttcattccggttgcggactccaccaaagcggatatctactgtctgcacctttctgaagaaaacggtgtaactggtctgtatggtggtgaaaacgccggtatcgttgtggaaaacatcggtactgttcagaacaaagacgcagttcgtactcgtgtgaagtggtactgctctctggccaataagcacgacaaagctatcgcggcgctgactaacgtcaaaatttaatcctaataataggtaagtacttacctattatttttaaatgggtgggctatacgcccgccctttttataggagcgatatatgtcagaaaaaaaagtgaagatcactgaaaaggccttcaccgactttacgggggttatgttccgtacttctttcactaaatcggtgtccgatcatccagtaaacgagcgcatgcagaaccgtatcaccgcagctatgcgagcggttccgatggagcccactgtcgctgttactggtgtgtcggtaagtcctaagtcggcatcggtggaggtgaaaaaaacggttcaactcacggctaccgtggcgcctgctggtgctaccaacaagaaagttacctgggcgtcgaaaaatgctgaatttgcaacggttgacgcggctactggtctcgtgaccggcgttgcagaagggactgcaacaattgaagtcacgaccgcagacggcagccataaagcaaccgcaactattcaagttccagcagctgcagcctgattcagtaacaaagggtggctctggccaccctgttcagaggaaaactcatgaaaccagcaaaaattcatcttctggaacctcagttccttggatacacgggcatcctgtgcggcgtttactttaaagacggcatttccgtagcagagctgccattcctcgatcaacagcggatctgcgcctcaatgcgtgccgaaacgattgatgggcaaaatgtctctccatcagctgccttcagcaatcgtaacgagctggtggccgatcagattgtggagcctacggcccctgatattgtccctatgaaacgtggcgtcgcgaatgaggagacaaaacatgtgcagcgcttcacccgagaagaactggagtccattgctgactgtgaaggtatcgccggcctgcgccagatcggtaacacgcttggcgtgaaagcgaagggcattgttgaaatgattgagggcatcctgaaagcacaaggcggtgagtgatggctctgatcgacacgtttcgtagcggagacatcgtgtctctgaccttcgcctttaacgtactggatatcgactccgcctcttatacggtgcgagatagtgcaggcacaacacttgtggacgaagagcctctcgatattgcagaaggccaaatgtctataccggttgtaatctcagcagagcataaccagctggtcgaaaaagagcgtgatctgcgctacgtcatcgtgaaggccacagcgggtgggctaacccacgaagagcggcagatgtatgtgctgcttaatagctttgaactatccgtcccggctcagtcgtttgccaccgtagccgatgctcaaatgcaggccattgatatgatcaatggagatacattgctggctgatggagagggtttgatgcgcaagcggctaatcgaagcgacacggcgaattaaaaccttacctttctctatccggaggatcatgcgcatcgatttcgaccggtatgaccgtccccaaaacatgctgaatgtctatgacatcccctggggggctgacggcgtgtatcggcaagatttggtggactgggaacggatcacttcggagcagtttgcggatttaccagactactttaaagaggcgctgcttctggccaccgttaatgaggcatgcgagatcgccaatggcaacgatattgcgagtgcgcgagaagacggcattttgtctgaatcgatcggtgaaacaaccaatatgtaccgcacaagcaaagtggcgaatgtccgtgtggcccgcagcacctggcgattgcttattagttacatcaacaatcggatgattgttcgtcgtgcgtaatacacgtcgtgctctttacttctggtcgacaggccaaagacgggaaaccgcgcctccgcctggtaatgagtgcgacgacttcacacaaggagagtggatgaatatttcgtggcaagccgaattgtcgatctaccggtttggttccaaaaacgtctacggtgaagcgcaattgcagttcgtcaggaagacgaaagtaggcgtcgttaaatttgaacagagcaatgaaaaatcgtccgtcagggcagatagctctggaagccgcggaaaggcagcgctggagttgtttgacgcagtacttattgttccacttgaagccgctgttcaactcgatgacgttcttgtgctggaggggcagaagctgaaggtctcaagcgtacatcggcgatggggactacgtggccgccctgggcatcttgagctgggggcgaatatatgggtttgaaatatgacgcacaccagtttaagcgtgccggcgccagacttaataacagccagaaagcgttcaagcgatacctaatcagggacatggaaaagctggcgcgtctggttgaacgactggcacgagccatggccccgcttgaaaccgggtcgctggagagcgccatttttgcgcgggttgtaaaagaaggatacgcgggacttcgtattgagctttccgtatcaggcgcaaagcagcgcgaaggacatccaggcgttgaggttggggactatgccaaatacatggagcttggtaagtaccgtcttggttatttgtctcgtatgaagaatgttaccaaccctcctgtcgccggcgtgaagcctaaagtgggcccatatttccttgagcgagcgactcagatcagcgaaaagcaattttcgcagacgatcattgaagctgccagaaaagcaggatttacgcgagattgacatgtttgtagaagcattcgcaaaattgatacaaaaaaaggggcttggaaaagtagggacggacattttctgtcactatatgccatcaaaagttaagtctggcatcttgctgattaatcccaatacaggcatagccatcgacccggatttgcagggtttttacttcgactcattcacgatagtagttcgcaatgcgagtattacaaaatctgttgaaatggccaacaaaatcatggatatccttcctgttagcaacgttgagtctgaccgggtattcttcaaaatggttaggccgatggcgatgccaataacgtatccaataaatgacggatcgcttattgaaacggggattccacttgaatttgccgggtactttattgaactgaataaataagtaagtatatacttactattgtgtgtcggaatgacactgttttaacggaaaaaggagttttccaataatgtccaatacccatgttaaaaacatcaagcttggcgcctgcaaggtgtcgtttggtggcgtggatctgggttacaccaaaggcggtgttcaggttgaaatcgcaaccgaaacgctgaaagtgaccgtagaccagctgggccagaccacgatctccgagctgatccaaggccgcaacatcaccattactgcgccgctggctgaatccgtgttgaaaaacatggtcgatctgatgccaggttcaacgctgagttctggcgaagataccgtaactatcacgtctgcgcagggtgtgaacctgatcgacgttgcaaaagagttggtgctgaccccgcaggatgcgacggattatgttctgaccatccctaaagcagcaaccgcgggtaacttcaccatgacctaccagtctgacgacgttcgcgtgttctcagttgagttttccgcttacccggacgacgctggcgtgttggggaaaatgagcctcccaaagccggttgagagcgtcacgctgaccccgtcttcaccgaccgtaaaagtgggagctaaagttcagttgagcgcaacctttaccccggccgatgcaaccaataagactggcatgtggagctctgatgcgactgataaagcgaccgtagatcagaacggactggtaactggtaaagctgtcggttcagccaatatcaccttcacaactaatgacggcgccaagaaggcgaccaaagccgtctctgtaactgccgcaagctaaattgtgataacccaagaggcccatggatgggcctctgtatgagtttaaaaggatttaaaccatgaccaaattactcgatctcgactccattctgccgccgaaaaaaagcatcaaatttggtggcaaagaatatcccatcgttgaaatgaccgtcggcctctttgtttctatcaagcagatggaagacaaagacctcatgaatatgtctcccgtcgaccaggtaactgcctacgcagaactggtacgcaaagtcattccgtcagtacctgactccgttctggagaaactgactgtccagcaactccagcagatcttcaccttcgccatggaagtgattgatgaagagaacgaaaaagcggctggcgaaggggcaaagtaatatcccgcgatgaatccggggtaaagaccgtttcgatagatctcggattctatttcagtcgtgtagttgctcactacgccgtatcgccaatagagctactgagtgtcccgttaaccatgttctggatgctcagccgcaatatcgatcgtctgcgagcggaagaggatgtccgcaatctgcaggtcgcccgcgtcgcccaagcggatggcgatggcgttaaggcgttcatggagggtttgcaactcaggattggaaggccagtcgttactgataaagtctaccgtccgcatatggataaggcagaccccgacgccaaagagcagctgatgcaaatttttggcagaggatgacaagggaatgtcacaaaacgtagagtttatcctgtcgctggaagacaaacagtttacggcgtcaatcgaccgggcgggtaaattacttaccaaatttggcgagcgggctaccaaaccggctcaaaaaattaaaaacctcgagcgctctctgggttcggtctccagcattcttggcgctcttgaaacacgactcaattctacggcagacaaactgcaggacgtagctgccggttttgagctcgtttccaacacctctcgaaaggcacaacgtgaactgtccgctatcagcactgatttgcggacattcacagatcgcgttgattcggccacatcgtctacgcacaagttcctggcctcattgcggaaggttcagtcggaactcaatgagttttctgattgggtcaaatacgcaggagaccatgccggcaaattcaacactgagattaagggagccactacttctcttggtggaatgaacaccagactaaatgcgaccagcaagcgtctgagcaattgggggacaacgacaagccaggcggccgaggggttaaaaaaagtcaaagatcagatggatggcgttattcgaagccagcagctgatcagccgccctgtcagggtcagaacaaccacaacgggtgggggaggcagcggaggtggcgctgatcgatttaccgctgcgccccatcgcggtggcagtcgtgaaaatagcgtcttctctgggttacgcggcaatatttttcttctgggggaaattggcgatgcggccagaacggttactgacatcctgtttggttggcagaagccgatcgtagaggctgcggccgagatgcagcgtatgcgtgtcatgttgcgtggcttgaacaaggataaagtcaatcctggagaagccgctgctcaagatatgcagtatatcgtgaacatggcgaaaaacgccccatttgcgatgcaggccttaaccgactcatttgtgaaattccgttctgctgggctcgatcctactgatggctcgttaaaggcactggtggactcagtcgcacgttttggtggcgatagtgaattgcttaagcgagcggcggtggctgtccaacaaatgtctggtaagggcgtcgtgtcgatggaagagctccgccagcaattgggtgaagcggttccaaatgcgatgaaggcgatggcagatgcggccggtatcacgatgggggagctaaccaaagccgtctccagtgggaccgttgaagcgaaacaggctctttcgttgatgtttgttggtttgcgtgcggaaaacgaaaatgccgccaaagatatgatgcaaacctataccggtgcgttggcgcagctgcaaacctctttcactctgtttgctgatcgagtggggcaggctggataccttgactcgctgaccaaggggatgaaagagctggcggccataatgaacagcgcagaaggcatttcgttcgctaattcattgggagaggggcttaccaccgcgattgatggcctgcgcgagctggcgcaatggttggctaagaatcaggagttggttattacgctgggcaaaattgtcgccggattggtggcatttaaaatgctcagagcgggcattttaggtgttgtcggcgccggcggccagatgctttccaccttcatgaagatgtccactgtaatccagacaccattcacgctgggggcgacggcggtcactcgtttcaatcgtgctgcacgcatggggctggcaccaatcccatcgctcatttttgccattcgtggcgcgattacggggctgaaaggggcatttgctgggctgactgcgtttatcgcagcaaacccgattggtgctgcgtttactgttgcaacagtggctgttgccgggctgatcacctacatgaccatgcttcgcaacgaaacgtccaaagttgttgaggagattcgcaaaatccccgaagcgatgacggcagccaagcgagcacaaatggcggagcgcgcatcgcagctagagaagcaaattcagcgggaccagcaagcgcttaaaactggcgaaagtgttaactacatttccactgtcgccggccctgtcgccgttaaggagtctaaagaggttgttgaggctcgactgaagaaaaatcaggaagagtacaagagaaccactgacactatcgcgctgggggatggcgctgtatccaaacgtctggcgaaagaggctgctgaatcccagatcgagaaaatccgggcggataatcagctcttctcagctacgtttgttaaagcgcgtcaggaggcactggacaaaatccagaagatcaatgacgacaaaacattgtccgatgatgagaagaacaagctgcttgcaccgctgcgagagacagtaaacaaatcttatctgcagccggcccagaaacttgtcgactctttatcatcgcgtaagaccgcaactgaaaagcagatcgcacattttagcgatttgctggaaaaggcgaaaaaagaaggaaacacagaacaggtacagaagctgcagggcagtattcgcggctatcaggaacacctggagacgattgctcaggaactgacacaggctgagtttgaacgcgataacgcggcgaaaaccgggaagggcgtgaagaccaaccaaggaacagtgcttgggttgggcaccagcgacaaaggcgctgacaaagcgctcgcgcagtacatgcgcaaccagatggactctgcggtttaccagcgaacgctacctgatggcacaccaatgatggattttgaaggaaaacctatcattgggccgaagcagcttaaaactcagcttaacctgcagaaagcctcaactgcatcttctctggaaaagatgagcgagaaggagcgtgcagccgccatagccgcattaaccaaagctcgtgaacaagatgccgctgctgccgagagggcagggaagcgtactgcgaatgcctctgaacgcgcagcgaaaagggaggaaagagcgcaacagaagctggctgccggctaccagaaggctctggataaagctgatcagctcatggggcaaatgggcgaaagttcaaaggctactgtgtcgtttgatcagtcgctgcgtgatgtcaccaagtcactaaccgatcttgcaaacgccacgcctaacgagtttatctcgcaggagatggttgaccaggccaaaaaacgtctcgcggatttgaggaacgctacccccgaataccgcgaaatgtttaatcgccgcaacgtcgagcaaatgatcagcgcttgggcgccggaatcggattcgattatcagcgcaggcttgatgcaaagccatgaggagaaggctgccgagttttcggatacctacaatcgcaatcttaaggcgctgatcgagctgcgtgataaggcgactgacccgaaaatcatctcgctttacaacaagcagcttaatcagctggtggccgctggcaacaatgcgctgattaagcaaacaggtacagcgacccagcagttggctctggagtatgagaacctggctgaacagattgagggcacatggacagatctgtttagcggcttaactgacacgcttactgactttgttgttaacgggaagatgagcttctccagtctggccacatcgatccttaaagacatcaccaacatggtcgtgaagacccagatcactctgcctctcatgaatatgttgggaatgggaacgacaaacgccggcaatgcacaaagtggaaatctcatgaatggcgtagcgtctgcgatcgctaatcaaggggttcagctcggtaattctggtggggcggtggccaatggggataaatctgtcggcgaggccactaaggagacagcctccggcgtgaactctatggggcaagcgtctcagaatgcggccagcggtttaagccaggcggtgaatggtgtctgggactggacgaagtcattgttcaccggtactgacgctacgaaagatcaaaccaaagcggttaacagcagcatcctcagtatggggaatctgtctaccgcggcgggggcactggcagcaacattcgccatggtaggtgcttcgtcgtcgagttcgtccagccgttggctgaatttcggtctgtcactggccagtaccgcagtgtccgcttgggctgggtcttcgacgccatcaggctcaaagccaaatgtgaagaagcacgccaatggcggcatctttggcagggaaggggttgtgcctctgagagcttatcagaaaggcggaattgccacctcaccacagttggcgatgtttggcgagggctcaatgaacgaggcttacgttccgttgccagatggtcgaacaattccagtcacactttctgcagagtcggctggaaagagcacgggtaacgcggtgtcccctgtctcaattcagatcaatgtgaccaaggatggacgaaccagcgagagcagcagtggaagcgagagcaatctctggaacggtgcagcgcggcaaattaagtcgattgtgcttgagacgattgccgaagagaaacgttctggtggttcacttaatccgcataccaccagagggtagtaaagccggccgccttagcgggcggccatcacaaggaagtgatatgtcgaggaaagtatttaattggtatccagattatgagtctgagaaaacggtaaagcctaacgtgaccgtgctgaactacggcgatgattacgagcagcgccagtcgcaggggctcaatcggattaaagaagagtggtctctcacgttcacccgtagccatgacgtggtaaacgacgttgatgactttttgactgcccgcgcaggggtggagtcattcgtttggactaacccaagaggcaaagcaattatcgtggtatgtgatagccatacggtaaagcgttacccaggttatcaagtgcttacggcaacatttagacaggtttttgagtcttaatttgcgactatagataagtaagtacttatctattattatatatcaacgtcacaggatgtaacgttgagtttttcaaggatgaagtgatgggtattagagctgatattcagagtttatcgccttctgcgctcattgagttgttcgagctggatatgtcggtgacaacctccggcggcaagttgtatttccatgccggcaccaacgggcttagccagccaattgtctggcagggagtttcctatgagccgtggccaattaaagcgtctggctttgataaaagcggtcagggaacacttcctcgtccaaagattcaggtttccaactacgacggtgtaatttctgccgagctgcaggccaatgacgatctgattggctgcaaaatcattcgcaagatgacgctggcacgttttctggacgcggtgaactttcctgatggaaacccgaccgcagacccaagtcagcattttgctgatgaaatgtggttcgtcgaacagaagaccctggagacgcaccagtatgtcgaattcgagctgtccagcgtcttagatctgatgggcgttcaactgccgtatcgtcagatcatcaaaaacagctgcccgtggaaatatcgcggaacagagtgtggctacaccggcccatatttcgacaaaaacaaccagcaaacctctttggccggcgccgactactgcaccaagcgttacgacgcctgtaatgctcgtcgcaactacttcgcgaatggcgttattcattttggcggatttattggggcgacacgatatgagtaaccagacgttacctgagctgggctcagaagtcatgcaggatatctatcgctgcgctatccaacgttacccgaatgaagcgtgtggctttctggtacgcacacagggtgagaaatatcgctttatggaagcgatgaatgtctctgaaacgccacgtgaggattttgtcatgcgtgccagcgacattattgcggccgaagatgctggggaagtgatcgctatttggcactctcacgttgagcgcagcgcagaggcgtcagacccggatcgctccgggtgcgaggcgacggaactaccgtggatgattctggcaattcgcaaaaatgtggaaagcgatatgccattccaccttagcgaaatgaacgtcatttatccgtgtggttttgagatgccctacctcgggcgcccatacgtattcggtgtgtttgattgctggatgctgtgccgcgattacctaaagcgtgaatttgacgttgagctgaatgcaaacgcccacctgcatattccttcctggtacacgggggacaacgacatcctcgaccagaactaccgaaatgaaggacttgtccgcatggcgccggggacggaaccccagcgcggcgacatcttcttcatccagtacgggaaaatgccagatcactgcgcggtatacatcggcgacggcatgatcatgcatcaccagatcgaccgtctcagctgtcgggcttattacggtgggatgtatcagaagcacacgacgcatcacctgcgtcacagggatttactcaagggagacgagacgtgtctgaattagttcatgttcagctcggcggtgcgatggcaaagaactttggccgccactggaaattgaaggtgcgcaacaccaaacaagccatcgatttgattgaggcgaatcgcccgggctttaaagcctggattaagcgtaaccgtaaccacttcgataagtaccacatccaggtcacaaataagcagggccacaagtggtcaatggacgacaccgaataccagatgatgggcgagtcggaaaatatcgcaaaaatccgcattactcccgtaccacgtggcagcggtggtaaggcgtttgggtggttccagactttcgtgggcgccgcgatgatcgctgtcggcgctctggcctctgggctgacttttggtgcgtcttccgcgctggtaatgggagggatgtcattgatgatgggcggtgtgtccatgctgatttcgccgcaggcatcaaatgcgtctgtcagacaggcggataacacggattcgttttacttcgatgggcctcaaaacaccagcaaccagggaaacccggttcagcttaattacggcgaggaaattttagttggctcacagattgtgagttcttcaatcaccatagaccaactgtaagggaagttttttgaacatggatcagttcaagaaaaagagattgcccctcctgattgcgggagcgggcggcaaaaagagctcaggctcaagccgtacaccagttgaagcggatgataccgttaattctcgcaccatggcgtctatcctcgatctgctcggggaaggtgttgttggtgggttgattgacggtgctaaatctatcttcgtcgatggtgtggcgctacagaacgaagacggttcattcaaccgttccggtgtaacttgggatttccgggatggttcgcaagaccaaagcccgatgcctggtttcgattttgtcgaaacgccaaaggccgttaatacacagctgaaaaccacaaacgcggttacggttgccatcgataacgacgatgctgatcgtgtccgagtgatcatgaagttcccgtcgctgcgtagcattgacaagaaaacaggggacacaaacggtacttcggtccagtttaagttccagctggccaacggcaatggctctttctatgacgtgattgctgcaggtgagagcagctctgacgtgacgctgactgcgaaaaagactggtgtctactaccgcagttacgaaatccagcttccaaagcctgggcgtgcctataaagtgcgcgtgcttcgtctctccgccgacagcaacgatcagtatctctttaacgatacctgggtcgactctatcggtgagatcgttgacaccccaatgaactacccgaactccgttctggttggccttaaggttaactctgagcagtttggtagctctatgccgtcacgttcgtatcttatccgtggcctcaaaatccgtgtgccttcgaattatgatgaaaacacgaacacttataacggcgtttgggatggaacctttaagcttctgtcgtcttccaaccctgcatggattctgttcgatctgctgaccaatgctcgttatggcctcggcaaatttgtttcggagtcaatgattgaccttggccagctttatcagatcggtcgctactgcgacgaagaggttgatgatggctttggtggcaaagaaaaacgctttgcaatcaacacccagatcaccagtcgtcaggacgcttatcgtctgattcaggatattgccggcgctttccgtggcatggttttctgggctggtggcatggtgaatatcatgcaggacagcccgtctgaccctgtcatgctgtttaccaacgcaaacgtaaaagatggcctgtttacctataaaggctctgctcgaaaagaccggccgtccgttgcgctgattacctataacaacaaacaagacggctataagcagaacgttgagtatgttgaagatcaggaagcgatggcccgatacggggagcgcaagaccgaggccgttgcgttcggatgcaccagccgtggtcaggctcatcgtgtaggtttgtggctgctctataccgcgcgtatggagtcagacatgatcacctttaccgcgggcctggacgcctcgttcctgatgccgggcgaaaccgttctgatccagaacaaatatcgtgccggcaaacgcaattccggtcgcatcgtctctttcaccaaaaacagcatcaccctcgatgcacctgtctctctgaaaaagagcggtagcttcatccgtatcatcaatcaggaaggcaaaatcgttgagcgagacatcaacgagaccggcgacaacatcactaaagttaccttcaagacggcgttggccacagccgatcaaccagtagcgaatggtgtctggacgatcaccgaaccagacctggttccaatgcgggcgcgcgttgtcgctatcgcgcaaggtgaaaccccggggtcgtttgatatcacggtggtgcagaacaatgcatctaagtaccaggcgattgataacggggcagcgctcgttccagaaaatacgacggttcttgatcccacatattccaaaccgagcaatctggtcatctcagaaggcacttatctgtccagtccgggcaacttgtccgtgaagctgatgcttgcctgggaaggtaaatcaccagaatactgggtcagctggcgccgctccgacgagggcaacgtctccaactggcaatctgcccgcgccacggaagaacaatatgaaatcgtcaatgttgccgaaaatgggcgatatgacttccagctgtattccgtttccttcggcggcaaaaaatccgagatcattactgctgtctatcaggtaaaaggcacgatgacgccgccaggggcgcccacatcactgaccgcggtgggggattatcgtaacgtggtattgaattgggttaaccctgattcagtcgacctcgcgcagatcaacgtgtatgcgtccaagacaaataagctggacaccgcgacactcattgctcaggccgccacaacgactttcactcacgctgggctgggtgacaacgagacctggtattactggattcgtgcggtaaacaaacgtgggatggtaggccagccgaactcgaacctcggtacagaggccaccactcgcgacgtattgtctttcctgaaagataagatcacatcttctgaactcggcaaggagctgctcgacgaaatcgacagcaaagccactcaggaggcggtagacaacgccattggcgaggttcagaactcagtcaacgagtctatccagcaagttgaaaacgatctggcgcaaacctcctccgaaattaaggcgcaggttgactctgtcaatcagtcgctgaaagaggacataaagaccgtcaatcagacgattgttgacaacatcgataccgtcaaccagacgatcaataccaacatctccaacgtaaacagccaaattgaagctgcaaaacagtctattaaagacggcgacgcggctctgtcgcaggagattaagaatgcgcagtcatcactgacaacgtcgctgtcccagaccagcaaagatctgactgcggccattcagaaagagacgaatgaccgtattgcagatgttaatgatgcagccaagcaagcggccgaccaactgctgagcgcgaagaatgagctgaaaacctctatcgatagcttgtctgaggttgtgacctccggtgacgaaaacctcgcgcgacagatctcgcagattgccgctggcacaggggaacagtttgactctctgaaaatctggtatttcgaccaggacgctgaaggctggacggaagatgataatggctacacgccaatga
